(19) United States
(12) Patent Application Publication
(10) Pub. No.: US 2023/0088159 A1
(43) Pub. Date: Mar. 23, 2023

(54) COMPOSITIONS AND METHODS FOR ASSESSING IMMUNE RESPONSE

(71) Applicant: Life Technologies Corporation, Carlsbad, CA (US)

(72) Inventors: Ann Mongan, San Francisco, CA (US); Alex Atkins, San Francisco, CA (US)

(73) Assignee: Life Technologies Corporation, Carlsbad, CA (US)

(21) Appl. No.: 17/816,214

(22) Filed: Jul. 29, 2022

Related U.S. Application Data
(62) Division of application No. 16/335,553, filed on Aug. 12, 2019, now Pat. No. 11,466,328.
(60) Provisional application No. 62/419,091, filed on Nov. 8, 2016.
(60) Provisional application No. 62/398,756, filed on Sep. 23, 2016.

(51) Int. Cl. C12Q 1/6886

(52) U.S. Cl. CPC C12Q 1/6886; C12Q 2600/106; C12Q 2600/158; C12Q 2600/16

(57) ABSTRACT

The present invention provides methods and compositions that are useful for assessing gene expression for tumor immune response profile of a sample. In particular, a target-specific primer panel is provided that allows for selective amplification of immune response target sequences in a sample. In one aspect, the invention relates to target-specific primers useful for selective amplification of one or more target sequences associated with immune response. In some aspects, amplified target sequences obtained using the disclosed methods, and compositions can be used in various processes including nucleic acid sequencing and used to detect the presence of genetic variants and/or expression levels of one or more targeted sequences associated with immune response.

### RELATED APPLICATIONS

[0001] This application claims priority to and the benefit of U.S. Provisional Application No. 62/398,756 filed Sep. 23, 2016 and U.S. Provisional Application No. 62/419,091 filed Nov. 8, 2016. The entire contents of each of the aforementioned applications are incorporated herein by reference.

### SEQUENCE LISTING

[0002] This application hereby incorporates by reference the material of the electronic Sequence Listing filed concurrently herewith. The material in the electronic Sequence Listing is submitted as a text (.txt) file entitled “LT01193_ST25.txt” created on Sep. 22, 2017, and is herein incorporated by reference in its entirety.

### BACKGROUND

[0003] Advances in cancer immunotherapies have started to provide promising results across oncology. Immune checkpoint inhibitors, cancer vaccines and T-cell therapies have shown sustainable results in responsive populations over conventional or targeted therapies. However, effective identification of responsive candidates and/or monitoring response has proven challenging. The need of a better understanding of the tumor microenvironment, tumor-lymphocyte interactions and drug response biomarkers is immediate. In particular, for example, while the presence of PD-L1 has been reported to be a promising marker to predict positive response to anti-PD-L1 therapy, current methods using immunohistochemistry to measure PD-L1 protein levels are inefficient and highly variable. Higher-throughput, systematic and standardized solutions are a more desirable alternative.

### BRIEF SUMMARY OF THE INVENTION

[0004] In one aspect of the invention compositions are provided for a single stream multiplex determination of an immune response in a sample. In some embodiments the composition consists of a plurality of primer pair reagents directed to a plurality of target sequences to measure the expression levels of the targets in the sample. Provided compositions target immune response genes and housekeeping gene sequences wherein the plurality of immune response target gene sequences are selected from targets among the following function: checkpoint pathways, T cell related signaling pathways, markers of tumor infiltrating lymphocytes (TILS), tumor markers, and housekeeping genes. In some embodiments the plurality of immune response target genes are selected from targets among immune checkpoint pathways and targets; T and B cell signaling genes, markers of lymphocyte subsets, interferon signaling genes, cytokine signaling genes; tumor markers, tumor antigens, and proliferation markers. In particular embodiments, provided compositions include a plurality of primer pair reagents selected from Table 2. In some embodiments a multiplex assay comprising compositions of the invention is provided. In some embodiments a test kit comprising compositions of the invention is provided.

[0005] In another aspect of the invention, methods are provided for determining immune response activity in a biological sample. Such methods comprise performing multiplex amplification of a plurality of target expression sequences from a biological sample containing target sequences. Amplification comprises contacting at least a portion of the sample comprising multiple target sequences of interest using a plurality of target-specific primer pairs in the presence of a polymerase under amplification conditions to produce a plurality of amplified target expression sequences. The methods further comprise detecting the level of expression of each of the plurality of target immune response sequences, wherein a change in the level of expression of one or more target immune response markers as compared with a control sample determines a change in immune response activity in the sample. The methods described herein utilize compositions of the invention provided herein.

### BRIEF DESCRIPTION OF THE DRAWINGS

[0006] The accompanying drawings, which are incorporated into and form a part of the specification, illustrate one or more exemplary embodiments and serve to explain the principles of various exemplary embodiments. The drawings are exemplary and explanatory only and are not to be construed as limiting or restrictive in any way.

[0007] FIG. 1 depicts exemplary repeatibility results of immune response research assay. Immune responses assay produced correlation greater than 0.98 between replicates of FFPE research samples of NSCLC, melanoma, and normal liver tissue.

[0008] FIG. 2A-2C depicts exemplary result of immune response assay to determine limits of detection and dynamic range: FIG. 2A depicts ratios of samples of HL-60 and human lung total RNA measured individually and mixed at 4 different ratios to evaluate dynamic range; FIG. 2B depicts exemplary results of correlation of fold changes between pure and mixed samples; and FIG. 2C depicts exemplary results of correlations among rank order of fold change between pure and mixed samples.

[0009] FIG. 3 depicts exemplary results of correlations between quantitative RT-PCR detection and the immune response NGS assay of the invention. Twenty two genes were selected and tested by quantitative RT-PCR in NSCLC and melanoma FFPE samples. Results demonstrated correlations between quantitative RT-PCR and NGS are 0.85 to 0.95.

[0010] FIG. 4 depicts exemplary results of correlation among fresh frozen and FFPE samples. NSCLC fresh frozen and FFPE samples showed greater than 0.96 correlation.

[0011] FIG. 5A-5D depicts exemplary results of the immune response assay. FIG. 5A is gene expression distribution plot; FIG. 5B is a bar graph depicting housekeeping gene expression; FIG. 5C is a sample correlation heatmap; and FIG. 5D depicts results of two principle component analysis for samples tested.

[0012] FIG. 6 depicts exemplary results of sample correlation of the immune response assay.

[0013] FIG. 7 depicts exemplary heatmap results of all targets of the immune response assay.

[0014] FIG. 8 depicts results of a simulated CPM normalization applied to measure the expression of genes and calculate fold change. Using endogenous controls accurately estimates fold change, because while most genes do not change between samples, fold change estimate is negligible error; however, when many genes do change, fold change estimate is wildly inaccurate.

[0015] FIG. 9A-B depicts results suggesting housekeeping gene control allow for better expression estimates. FIG. 9A depicts results of correlation of estimated and true expression among various genes, including an assay made of only the 5 genes associated with the leukocyte inhibition category. Assuming only interest in a leukocyte inhibition assay, and using just those genes, we do not get a high correlation with true expression; adding leukocyte migration only helps mildly (21 genes); adding stemness and tumor makers (uncorrelated categories; 27 genes) increases the correlation. However, using only targets and 11 housekeeping (HK) genes works just as well as including non-informative genes and true expression. FIG. 9B depicts results comparing performance of HK normalization, CPM and CPM without housekeeping, demonstrating housekeeping normalization increases correlation with true expression as expression decreases.

### DESCRIPTION OF THE INVENTION

[0016] The following description of various exemplary embodiments is exemplary and explanatory only and is not to be construed as limiting or restrictive in any way. Other embodiments, features, objects, and advantages of the present teachings will be apparent from the description and accompanying drawings, and from the claims. Unless defined otherwise, all technical and scientific terms used herein have the same meaning as is commonly understood by one of ordinary skill in the art to which these inventions belong.

[0017] As used herein, the terms “comprises,” “comprising,” “includes,” “including,” “has,” “having” or any other variation thereof, are intended to cover a non-exclusive inclusion. For example, a process, method, article, or apparatus that comprises a list of features is not necessarily limited only to those features but may include other features not expressly listed or inherent to such process, method, article, or apparatus. Further, unless expressly stated to the contrary, “or” refers to an inclusive-or and not to an exclusive-or.

[0018] As used herein, “amplify”, “amplifying” or “amplification reaction” and their derivatives, refer to any action or process whereby at least a portion of a nucleic acid molecule (referred to as a template nucleic acid molecule) is replicated or copied into at least one additional nucleic acid molecule. The additional nucleic acid molecule optionally includes sequence that is substantially identical or substantially complementary to at least some portion of the template nucleic acid molecule. The template nucleic acid molecule can be single-stranded or double-stranded and the additional nucleic acid molecule can independently be single-stranded or double-stranded. In some embodiments, amplification includes a template-dependent in vitro enzyme-catalyzed reaction for the production of at least one copy of at least some portion of the nucleic acid molecule or the production of at least one copy of a nucleic acid sequence that is complementary to at least some portion of the nucleic acid molecule. Amplification optionally includes linear or exponential replication of a nucleic acid molecule. In some embodiments, such amplification is performed using isothermal conditions; in other embodiments, such amplification can include thermocycling. In some embodiments, the amplification is a multiplex amplification that includes the simultaneous amplification of a plurality of target sequences in a single amplification reaction. At least some of the target sequences can be situated on the same nucleic acid molecule or on different target nucleic acid molecules included in the single amplification reaction. In some embodiments, “amplification” includes amplification of at least some portion of DNA- and RNA-based nucleic acids alone, or in combination. The amplification reaction can include single or double-stranded nucleic acid substrates and can further including any of the amplification processes known to one of ordinary skill in the art. In some embodiments, the amplification reaction includes polymerase chain reaction (PCR).

[0019] As used herein, “amplification conditions” and its derivatives, refers to conditions suitable for amplifying one or more nucleic acid sequences. Such amplification can be linear or exponential. In some embodiments, the amplification conditions can include isothermal conditions or alternatively can include thermocyling conditions, or a combination of isothermal and thermocycling conditions. In some embodiments, the conditions suitable for amplifying one or more nucleic acid sequences includes polymerase chain reaction (PCR) conditions. Typically, the amplification conditions refer to a reaction mixture that is sufficient to amplify nucleic acids such as one or more target sequences, or to amplify an amplified target sequence ligated to one or more adapters, e.g., an adapter-ligated amplified target sequence. Amplification conditions include a catalyst for amplification or for nucleic acid synthesis, for example a polymerase; a primer that possesses some degree of complementarity to the nucleic acid to be amplified; and nucleotides, such as deoxyribonucleotide triphosphates (dNTPs) to promote extension of the primer once hybridized to the nucleic acid. The amplification conditions can require hybridization or annealing of a primer to a nucleic acid, extension of the primer and a denaturing step in which the extended primer is separated from the nucleic acid sequence undergoing amplification. Typically, but not necessarily, amplification conditions can include thermocycling; in some embodiments, amplification conditions include a plurality of cycles where the steps of annealing, extending and separating are repeated. Typically, the amplification conditions include cations such as Mg⁺⁺ or Mn⁺⁺ (e.g., MgCl₂, etc) and can also include various modifiers of ionic strength.

[0020] As used herein, “target sequence” or “target sequence of interest” and its derivatives, refers to any single or double-stranded nucleic acid sequence that can be amplified or synthesized according to the disclosure, including any nucleic acid sequence suspected or expected to be present in a sample. In some embodiments, the target sequence is present in double-stranded form and includes at least a portion of the particular nucleotide sequence to be amplified or synthesized, or its complement, prior to the addition of target-specific primers or appended adapters. Target sequences can include the nucleic acids to which primers useful in the amplification or synthesis reaction can hybridize prior to extension by a polymerase. In some embodiments, the term refers to a nucleic acid sequence whose sequence identity, ordering or location of nucleotides is determined by one or more of the methods of the disclosure.

[0021] As defined herein, “sample” and its derivatives, is used in its broadest sense and includes any specimen, culture and the like that is suspected of including a target. In some embodiments, the sample comprises cDNA, RNA, PNA, LNA, chimeric, hybrid, or multiplex-forms of nucleic acids. The sample can include any biological, clinical, surgical, agricultural, atmospheric or aquatic-based specimen containing one or more nucleic acids. The term also includes any isolated nucleic acid sample such a expressed RNA, fresh-frozen or formalin-fixed paraffin-embedded nucleic acid specimen.

[0022] As used herein, “contacting” and its derivatives, when used in reference to two or more components, refers to any process whereby the approach, proximity, mixture or commingling of the referenced components is promoted or achieved without necessarily requiring physical contact of such components, and includes mixing of solutions containing any one or more of the referenced components with each other. The referenced components may be contacted in any particular order or combination and the particular order of recitation of components is not limiting. For example, “contacting A with B and C” encompasses embodiments where A is first contacted with B then C, as well as embodiments where C is contacted with A then B, as well as embodiments where a mixture of A and C is contacted with B, and the like. Furthermore, such contacting does not necessarily require that the end result of the contacting process be a mixture including all of the referenced components, as long as at some point during the contacting process all of the referenced components are simultaneously present or simultaneously included in the same mixture or solution. Where one or more of the referenced components to be contacted includes a plurality (e.g., “contacting a target sequence with a plurality of target-specific primers and a polymerase”), then each member of the plurality can be viewed as an individual component of the contacting process, such that the contacting can include contacting of any one or more members of the plurality with any other member of the plurality and/or with any other referenced component (e.g., some but not all of the plurality of target specific primers can be contacted with a target sequence, then a polymerase, and then with other members of the plurality of target-specific primers) in any order or combination.

[0023] As used herein, the term “primer” and its derivatives refer to any polynucleotide that can hybridize to a target sequence of interest. In some embodiments, the primer can also serve to prime nucleic acid synthesis. Typically, the primer functions as a substrate onto which nucleotides can be polymerized by a polymerase; in some embodiments, however, the primer can become incorporated into the synthesized nucleic acid strand and provide a site to which another primer can hybridize to prime synthesis of a new strand that is complementary to the synthesized nucleic acid molecule. The primer may be comprised of any combination of nucleotides or analogs thereof, which may be optionally linked to form a linear polymer of any suitable length. In some embodiments, the primer is a single-stranded oligonucleotide or polynucleotide. (For purposes of this disclosure, the terms ‘polynucleotide” and “oligonucleotide” are used interchangeably herein and do not necessarily indicate any difference in length between the two). In some embodiments, the primer is single-stranded but it can also be double-stranded. The primer optionally occurs naturally, as in a purified restriction digest, or can be produced synthetically. In some embodiments, the primer acts as a point of initiation for amplification or synthesis when exposed to amplification or synthesis conditions; such amplification or synthesis can occur in a template-dependent fashion and optionally results in formation of a primer extension product that is complementary to at least a portion of the target sequence. Exemplary amplification or synthesis conditions can include contacting the primer with a polynucleotide template (e.g., a template including a target sequence), nucleotides and an inducing agent such as a polymerase at a suitable temperature and pH to induce polymerization of nucleotides onto an end of the target-specific primer. If double-stranded, the primer can optionally be treated to separate its strands before being used to prepare primer extension products. In some embodiments, the primer is an oligodeoxyribonucleotide or an oligoribonucleotide. In some embodiments, the primer can include one or more nucleotide analogs. The exact length and/or composition, including sequence, of the target-specific primer can influence many properties, including melting temperature (Tm), GC content, formation of secondary structures, repeat nucleotide motifs, length of predicted primer extension products, extent of coverage across a nucleic acid molecule of interest, number of primers present in a single amplification or synthesis reaction, presence of nucleotide analogs or modified nucleotides within the primers, and the like. In some embodiments, a primer can be paired with a compatible primer within an amplification or synthesis reaction to form a primer pair consisting or a forward primer and a reverse primer. In some embodiments, the forward primer of the primer pair includes a sequence that is substantially complementary to at least a portion of a strand of a nucleic acid molecule, and the reverse primer of the primer of the primer pair includes a sequence that is substantially identical to at least of portion of the strand. In some embodiments, the forward primer and the reverse primer are capable of hybridizing to opposite strands of a nucleic acid duplex. Optionally, the forward primer primes synthesis of a first nucleic acid strand, and the reverse primer primes synthesis of a second nucleic acid strand, wherein the first and second strands are substantially complementary to each other, or can hybridize to form a double-stranded nucleic acid molecule. In some embodiments, one end of an amplification or synthesis product is defined by the forward primer and the other end of the amplification or synthesis product is defined by the reverse primer. In some embodiments, where the amplification or synthesis of lengthy primer extension products is required, such as amplifying an exon, coding region, or gene, several primer pairs can be created than span the desired length to enable sufficient amplification of the region. In some embodiments, a primer can include one or more cleavable groups. In some embodiments, primer lengths are in the range of about 10 to about 60 nucleotides, about 12 to about 50 nucleotides and about 15 to about 40 nucleotides in length. Typically, a primer is capable of hybridizing to a corresponding target sequence and undergoing primer extension when exposed to amplification conditions in the presence of dNTPS and a polymerase. In some instances, the particular nucleotide sequence or a portion of the primer is known at the outset of the amplification reaction or can be determined by one or more of the methods disclosed herein. In some embodiments, the primer includes one or more cleavable groups at one or more locations within the primer.

[0024] As used herein, “target-specific primer” and its derivatives, refers to a single stranded or double-stranded polynucleotide, typically an oligonucleotide, that includes at least one sequence that is at least 50% complementary, typically at least 75% complementary or at least 85% complementary, more typically at least 90% complementary, more typically at least 95% complementary, more typically at least 98% or at least 99% complementary, or identical, to at least a portion of a nucleic acid molecule that includes a target sequence. In such instances, the target-specific primer and target sequence are described as “corresponding” to each other. In some embodiments, the target-specific primer is capable of hybridizing to at least a portion of its corresponding target sequence (or to a complement of the target sequence); such hybridization can optionally be performed under standard hybridization conditions or under stringent hybridization conditions. In some embodiments, the target-specific primer is not capable of hybridizing to the target sequence, or to its complement, but is capable of hybridizing to a portion of a nucleic acid strand including the target sequence, or to its complement. In some embodiments, the target-specific primer includes at least one sequence that is at least 75% complementary, typically at least 85% complementary, more typically at least 90% complementary, more typically at least 95% complementary, more typically at least 98% complementary, or more typically at least 99% complementary, to at least a portion of the target sequence itself; in other embodiments, the target-specific primer includes at least one sequence that is at least 75% complementary, typically at least 85% complementary, more typically at least 90% complementary, more typically at least 95% complementary, more typically at least 98% complementary, or more typically at least 99% complementary, to at least a portion of the nucleic acid molecule other than the target sequence. In some embodiments, the target-specific primer is substantially non-complementary to other target sequences present in the sample; optionally, the target-specific primer is substantially non-complementary to other nucleic acid molecules present in the sample. In some embodiments, nucleic acid molecules present in the sample that do not include or correspond to a target sequence (or to a complement of the target sequence) are referred to as “non-specific” sequences or “non-specific nucleic acids”. In some embodiments, the target-specific primer is designed to include a nucleotide sequence that is substantially complementary to at least a portion of its corresponding target sequence. In some embodiments, a target-specific primer is at least 95% complementary, or at least 99% complementary, or identical, across its entire length to at least a portion of a nucleic acid molecule that includes its corresponding target sequence. In some embodiments, a target-specific primer can be at least 90%, at least 95% complementary, at least 98% complementary or at least 99% complementary, or identical, across its entire length to at least a portion of its corresponding target sequence. In some embodiments, a forward target-specific primer and a reverse target-specific primer define a target-specific primer pair that can be used to amplify the target sequence via template-dependent primer extension. Typically, each primer of a target-specific primer pair includes at least one sequence that is substantially complementary to at least a portion of a nucleic acid molecule including a corresponding target sequence but that is less than 50% complementary to at least one other target sequence in the sample. In some embodiments, amplification can be performed using multiple target-specific primer pairs in a single amplification reaction, wherein each primer pair includes a forward target-specific primer and a reverse target-specific primer, each including at least one sequence that substantially complementary or substantially identical to a corresponding target sequence in the sample, and each primer pair having a different corresponding target sequence. In some embodiments, the target-specific primer can be substantially non-complementary at its 3′ end or its 5′ end to any other target-specific primer present in an amplification reaction. In some embodiments, the target-specific primer can include minimal cross hybridization to other target-specific primers in the amplification reaction. In some embodiments, target-specific primers include minimal cross-hybridization to non-specific sequences in the amplification reaction mixture. In some embodiments, the target-specific primers include minimal self-complementarity. In some embodiments, the target-specific primers can include one or more cleavable groups located at the 3′ end. In some embodiments, the target-specific primers can include one or more cleavable groups located near or about a central nucleotide of the target-specific primer. In some embodiments, one of more targets-specific primers includes only non-cleavable nucleotides at the 5′ end of the target-specific primer. In some embodiments, a target specific primer includes minimal nucleotide sequence overlap at the 3′end or the 5′ end of the primer as compared to one or more different target-specific primers, optionally in the same amplification reaction. In some embodiments 1, 2, 3, 4, 5, 6, 7, 8, 9, 10 or more, target-specific primers in a single reaction mixture include one or more of the above embodiments. In some embodiments, substantially all of the plurality of target-specific primers in a single reaction mixture includes one or more of the above embodiments.

[0025] As used herein, “polymerase” and its derivatives, refers to any enzyme that can catalyze the polymerization of nucleotides (including analogs thereof) into a nucleic acid strand. Typically but not necessarily, such nucleotide polymerization can occur in a template-dependent fashion. Such polymerases can include without limitation naturally occurring polymerases and any subunits and truncations thereof, mutant polymerases, variant polymerases, recombinant, fusion or otherwise engineered polymerases, chemically modified polymerases, synthetic molecules or assemblies, and any analogs, derivatives or fragments thereof that retain the ability to catalyze such polymerization. Optionally, the polymerase can be a mutant polymerase comprising one or more mutations involving the replacement of one or more amino acids with other amino acids, the insertion or deletion of one or more amino acids from the polymerase, or the linkage of parts of two or more polymerases. Typically, the polymerase comprises one or more active sites at which nucleotide binding and/or catalysis of nucleotide polymerization can occur. Some exemplary polymerases include without limitation DNA polymerases and RNA polymerases. The term “polymerase” and its variants, as used herein, also refers to fusion proteins comprising at least two portions linked to each other, where the first portion comprises a peptide that can catalyze the polymerization of nucleotides into a nucleic acid strand and is linked to a second portion that comprises a second polypeptide. In some embodiments, the second polypeptide can include a reporter enzyme or a processivity-enhancing domain. Optionally, the polymerase can possess 5′ exonuclease activity or terminal transferase activity. In some embodiments, the polymerase can be optionally reactivated, for example through the use of heat, chemicals or re-addition of new amounts of polymerase into a reaction mixture. In some embodiments, the polymerase can include a hot-start polymerase or an aptamer based polymerase that optionally can be reactivated.

[0026] As used herein, the term “nucleotide” and its variants comprises any compound, including without limitation any naturally occurring nucleotide or analog thereof, which can bind selectively to, or can be polymerized by, a polymerase. Typically, but not necessarily, selective binding of the nucleotide to the polymerase is followed by polymerization of the nucleotide into a nucleic acid strand by the polymerase; occasionally however the nucleotide may dissociate from the polymerase without becoming incorporated into the nucleic acid strand, an event referred to herein as a “non-productive” event. Such nucleotides include not only naturally occurring nucleotides but also any analogs, regardless of their structure, that can bind selectively to, or can be polymerized by, a polymerase. While naturally occurring nucleotides typically comprise base, sugar and phosphate moieties, the nucleotides of the present disclosure can include compounds lacking any one, some or all of such moieties. In some embodiments, the nucleotide can optionally include a chain of phosphorus atoms comprising three, four, five, six, seven, eight, nine, ten or more phosphorus atoms. In some embodiments, the phosphorus chain can be attached to any carbon of a sugar ring, such as the 5′ carbon. The phosphorus chain can be linked to the sugar with an intervening O or S. In one embodiment, one or more phosphorus atoms in the chain can be part of a phosphate group having P and O. In another embodiment, the phosphorus atoms in the chain can be linked together with intervening O, NH, S, methylene, substituted methylene, ethylene, substituted ethylene, CNH₂, C(O), C(CH₂), CH₂CH₂, or C(OH)CH₂R (where R can be a 4-pyridine or 1-imidazole). In one embodiment, the phosphorus atoms in the chain can have side groups having O, BH₃, or S. In the phosphorus chain, a phosphorus atom with a side group other than O can be a substituted phosphate group. In the phosphorus chain, phosphorus atoms with an intervening atom other than O can be a substituted phosphate group. Some examples of nucleotide analogs are described in Xu, U.S. Pat. No. 7,405,281. In some embodiments, the nucleotide comprises a label and referred to herein as a “labeled nucleotide”; the label of the labeled nucleotide is referred to herein as a “nucleotide label”. In some embodiments, the label can be in the form of a fluorescent dye attached to the terminal phosphate group, i.e., the phosphate group most distal from the sugar. Some examples of nucleotides that can be used in the disclosed methods and compositions include, but are not limited to, ribonucleotides, deoxyribonucleotides, modified ribonucleotides, modified deoxyribonucleotides, ribonucleotide polyphosphates, deoxyribonucleotide polyphosphates, modified ribonucleotide polyphosphates, modified deoxyribonucleotide polyphosphates, peptide nucleotides, modified peptide nucleotides, metallonucleosides, phosphonate nucleosides, and modified phosphate-sugar backbone nucleotides, analogs, derivatives, or variants of the foregoing compounds, and the like. In some embodiments, the nucleotide can comprise non-oxygen moieties such as, for example, thio- or borano-moieties, in place of the oxygen moiety bridging the alpha phosphate and the sugar of the nucleotide, or the alpha and beta phosphates of the nucleotide, or the beta and gamma phosphates of the nucleotide, or between any other two phosphates of the nucleotide, or any combination thereof. “Nucleotide 5′-triphosphate” refers to a nucleotide with a triphosphate ester group at the 5′ position, and are sometimes denoted as “NTP”, or “dNTP” and “ddNTP” to particularly point out the structural features of the ribose sugar. The triphosphate ester group can include sulfur substitutions for the various oxygens, e.g. .alpha.-thio-nucleotide 5′-triphosphates. For a review of nucleic acid chemistry, see: Shabarova, Z. and Bogdanov, A. Advanced Organic Chemistry of Nucleic Acids, VCH, New York, 1994.

[0027] The term “extension” and its variants, as used herein, when used in reference to a given primer, comprises any in vivo or in vitro enzymatic activity characteristic of a given polymerase that relates to polymerization of one or more nucleotides onto an end of an existing nucleic acid molecule. Typically but not necessarily such primer extension occurs in a template-dependent fashion; during template-dependent extension, the order and selection of bases is driven by established base pairing rules, which can include Watson-Crick type base pairing rules or alternatively (and especially in the case of extension reactions involving nucleotide analogs) by some other type of base pairing paradigm. In one non-limiting example, extension occurs via polymerization of nucleotides on the 3′OH end of the nucleic acid molecule by the polymerase.

[0028] The term “portion” and its variants, as used herein, when used in reference to a given nucleic acid molecule, for example a primer or a template nucleic acid molecule, comprises any number of contiguous nucleotides within the length of the nucleic acid molecule, including the partial or entire length of the nucleic acid molecule.

[0029] The terms “identity” and “identical” and their variants, as used herein, when used in reference to two or more nucleic acid sequences, refer to similarity in sequence of the two or more sequences (e.g., nucleotide or polypeptide sequences). In the context of two or more homologous sequences, the percent identity or homology of the sequences or subsequences thereof indicates the percentage of all monomeric units (e.g., nucleotides or amino acids) that are the same (i.e., about 70% identity, preferably 75%, 80%, 85%, 90%, 95%, 98% or 99% identity). The percent identity can be over a specified region, when compared and aligned for maximum correspondence over a comparison window, or designated region as measured using a BLAST or BLAST 2.0 sequence comparison algorithms with default parameters described below, or by manual alignment and visual inspection. Sequences are said to be “substantially identical” when there is at least 85% identity at the amino acid level or at the nucleotide level. Preferably, the identity exists over a region that is at least about 25, 50, or 100 residues in length, or across the entire length of at least one compared sequence. A typical algorithm for determining percent sequence identity and sequence similarity are the BLAST and BLAST 2.0 algorithms, which are described in Altschul et al, Nuc. Acids Res. 25:3389-3402 (1977). Other methods include the algorithms of Smith & Waterman, Adv. Appl. Math. 2:482 (1981), and Needleman & Wunsch, J. Mol. Biol. 48:443 (1970), etc. Another indication that two nucleic acid sequences are substantially identical is that the two molecules or their complements hybridize to each other under stringent hybridization conditions.

[0030] The terms “complementary” and “complement” and their variants, as used herein, refer to any two or more nucleic acid sequences (e.g., portions or entireties of template nucleic acid molecules, target sequences and/or primers) that can undergo cumulative base pairing at two or more individual corresponding positions in antiparallel orientation, as in a hybridized duplex. Such base pairing can proceed according to any set of established rules, for example according to Watson-Crick base pairing rules or according to some other base pairing paradigm. Optionally there can be “complete” or “total” complementarity between a first and second nucleic acid sequence where each nucleotide in the first nucleic acid sequence can undergo a stabilizing base pairing interaction with a nucleotide in the corresponding antiparallel position on the second nucleic acid sequence. “Partial” complementarity describes nucleic acid sequences in which at least 20%, but less than 100%, of the residues of one nucleic acid sequence are complementary to residues in the other nucleic acid sequence. In some embodiments, at least 50%, but less than 100%, of the residues of one nucleic acid sequence are complementary to residues in the other nucleic acid sequence. In some embodiments, at least 70%, 80%, 90%, 95% or 98%, but less than 100%, of the residues of one nucleic acid sequence are complementary to residues in the other nucleic acid sequence. Sequences are said to be “substantially complementary” when at least 85% of the residues of one nucleic acid sequence are complementary to residues in the other nucleic acid sequence. In some embodiments, two complementary or substantially complementary sequences are capable of hybridizing to each other under standard or stringent hybridization conditions. “Non-complementary” describes nucleic acid sequences in which less than 20% of the residues of one nucleic acid sequence are complementary to residues in the other nucleic acid sequence. Sequences are said to be “substantially non-complementary” when less than 15% of the residues of one nucleic acid sequence are complementary to residues in the other nucleic acid sequence. In some embodiments, two non-complementary or substantially non-complementary sequences cannot hybridize to each other under standard or stringent hybridization conditions. A “mismatch” is present at any position in the two opposed nucleotides are not complementary. Complementary nucleotides include nucleotides that are efficiently incorporated by DNA polymerases opposite each other during DNA replication under physiological conditions. In a typical embodiment, complementary nucleotides can form base pairs with each other, such as the A-T/U and G-C base pairs formed through specific Watson-Crick type hydrogen bonding, or base pairs formed through some other type of base pairing paradigm, between the nucleobases of nucleotides and/or polynucleotides in positions antiparallel to each other. The complementarity of other artificial base pairs can be based on other types of hydrogen bonding and/or hydrophobicity of bases and/or shape complementarity between bases.

[0031] As used herein, “amplified target sequences” and its derivatives, refers to a nucleic acid sequence produced by the amplification of/amplifying the target sequences using target-specific primers and the methods provided herein. The amplified target sequences may be either of the same sense (the positive strand produced in the second round and subsequent even-numbered rounds of amplification) or antisense (i.e., the negative strand produced during the first and subsequent odd-numbered rounds of amplification) with respect to the target sequences. For the purposes of this disclosure, the amplified target sequences are typically less than 50% complementary to any portion of another amplified target sequence in the reaction.

[0032] As used herein, the terms “ligating”, “ligation” and their derivatives refer to the act or process for covalently linking two or more molecules together, for example, covalently linking two or more nucleic acid molecules to each other. In some embodiments, ligation includes joining nicks between adjacent nucleotides of nucleic acids. In some embodiments, ligation includes forming a covalent bond between an end of a first and an end of a second nucleic acid molecule. In some embodiments, for example embodiments wherein the nucleic acid molecules to be ligated include conventional nucleotide residues, the litigation can include forming a covalent bond between a 5′ phosphate group of one nucleic acid and a 3′ hydroxyl group of a second nucleic acid thereby forming a ligated nucleic acid molecule. In some embodiments, any means for joining nicks or bonding a 5′phosphate to a 3′ hydroxyl between adjacent nucleotides can be employed. In an exemplary embodiment, an enzyme such as a ligase can be used. For the purposes of this disclosure, an amplified target sequence can be ligated to an adapter to generate an adapter-ligated amplified target sequence.

[0033] As used herein, “ligase” and its derivatives, refers to any agent capable of catalyzing the ligation of two substrate molecules. In some embodiments, the ligase includes an enzyme capable of catalyzing the joining of nicks between adjacent nucleotides of a nucleic acid. In some embodiments, the ligase includes an enzyme capable of catalyzing the formation of a covalent bond between a 5′ phosphate of one nucleic acid molecule to a 3′ hydroxyl of another nucleic acid molecule thereby forming a ligated nucleic acid molecule. Suitable ligases may include, but not limited to, T4 DNA ligase, T4 RNA ligase, and E. coli DNA ligase.

[0034] As used herein, “ligation conditions” and its derivatives, refers to conditions suitable for ligating two molecules to each other. In some embodiments, the ligation conditions are suitable for sealing nicks or gaps between nucleic acids. As defined herein, a “nick” or “gap” refers to a nucleic acid molecule that lacks a directly bound 5′ phosphate of a mononucleotide pentose ring to a 3′ hydroxyl of a neighboring mononucleotide pentose ring within internal nucleotides of a nucleic acid sequence. As used herein, the term nick or gap is consistent with the use of the term in the art. Typically, a nick or gap can be ligated in the presence of an enzyme, such as ligase at an appropriate temperature and pH. In some embodiments, T4 DNA ligase can join a nick between nucleic acids at a temperature of about 70-72° C.

[0035] As used herein, “blunt-end ligation” and its derivatives, refers to ligation of two blunt-end double-stranded nucleic acid molecules to each other. A “blunt end” refers to an end of a double-stranded nucleic acid molecule wherein substantially all of the nucleotides in the end of one strand of the nucleic acid molecule are base paired with opposing nucleotides in the other strand of the same nucleic acid molecule. A nucleic acid molecule is not blunt ended if it has an end that includes a single-stranded portion greater than two nucleotides in length, referred to herein as an “overhang”. In some embodiments, the end of nucleic acid molecule does not include any single stranded portion, such that every nucleotide in one strand of the end is based paired with opposing nucleotides in the other strand of the same nucleic acid molecule. In some embodiments, the ends of the two blunt ended nucleic acid molecules that become ligated to each other do not include any overlapping, shared or complementary sequence. Typically, blunted-end ligation excludes the use of additional oligonucleotide adapters to assist in the ligation of the double-stranded amplified target sequence to the double-stranded adapter, such as patch oligonucleotides as described in Mitra and Varley, US2010/0129874, published May 27, 2010. In some embodiments, blunt-ended ligation includes a nick translation reaction to seal a nick created during the ligation process.

[0036] As used herein, the terms “adapter” or “adapter and its complements” and their derivatives, refers to any linear oligonucleotide which can be ligated to a nucleic acid molecule of the disclosure. Optionally, the adapter includes a nucleic acid sequence that is not substantially complementary to the 3′ end or the 5′ end of at least one target sequences within the sample. In some embodiments, the adapter is substantially non-complementary to the 3′ end or the 5′ end of any target sequence present in the sample. In some embodiments, the adapter includes any single stranded or double-stranded linear oligonucleotide that is not substantially complementary to an amplified target sequence. In some embodiments, the adapter is substantially non-complementary to at least one, some or all of the nucleic acid molecules of the sample. In some embodiments, suitable adapter lengths are in the range of about 10-100 nucleotides, about 12-60 nucleotides and about 15-50 nucleotides in length. An adapter can include any combination of nucleotides and/or nucleic acids. In some aspects, the adapter can include one or more cleavable groups at one or more locations. In another aspect, the adapter can include a sequence that is substantially identical, or substantially complementary, to at least a portion of a primer, for example a universal primer. In some embodiments, the adapter can include a barcode or tag to assist with downstream cataloguing, identification or sequencing. In some embodiments, a single-stranded adapter can act as a substrate for amplification when ligated to an amplified target sequence, particularly in the presence of a polymerase and dNTPs under suitable temperature and pH.

[0037] As used herein, “reamplifying” or “reamplification” and their derivatives refer to any process whereby at least a portion of an amplified nucleic acid molecule is further amplified via any suitable amplification process (referred to in some embodiments as a “secondary” amplification or “reamplification”, thereby producing a reamplified nucleic acid molecule. The secondary amplification need not be identical to the original amplification process whereby the amplified nucleic acid molecule was produced; nor need the reamplified nucleic acid molecule be completely identical or completely complementary to the amplified nucleic acid molecule; all that is required is that the reamplified nucleic acid molecule include at least a portion of the amplified nucleic acid molecule or its complement. For example, the reamplification can involve the use of different amplification conditions and/or different primers, including different target-specific primers than the primary amplification.

[0038] As defined herein, a “cleavable group” refers to any moiety that once incorporated into a nucleic acid can be cleaved under appropriate conditions. For example, a cleavable group can be incorporated into a target-specific primer, an amplified sequence, an adapter or a nucleic acid molecule of the sample. In an exemplary embodiment, a target-specific primer can include a cleavable group that becomes incorporated into the amplified product and is subsequently cleaved after amplification, thereby removing a portion, or all, of the target-specific primer from the amplified product. The cleavable group can be cleaved or otherwise removed from a target-specific primer, an amplified sequence, an adapter or a nucleic acid molecule of the sample by any acceptable means. For example, a cleavable group can be removed from a target-specific primer, an amplified sequence, an adapter or a nucleic acid molecule of the sample by enzymatic, thermal, photo-oxidative or chemical treatment. In one aspect, a cleavable group can include a nucleobase that is not naturally occurring. For example, an oligodeoxyribonucleotide can include one or more RNA nucleobases, such as uracil that can be removed by a uracil glycosylase. In some embodiments, a cleavable group can include one or more modified nucleobases (such as 7-methylguanine, 8-oxo-guanine, xanthine, hypoxanthine, 5,6-dihydrouracil or 5-methylcytosine) or one or more modified nucleosides (i.e., 7-methylguanosine, 8-oxo-deoxyguanosine, xanthosine, inosine, dihydrouridine or 5-methylcytidine). The modified nucleobases or nucleotides can be removed from the nucleic acid by enzymatic, chemical or thermal means. In one embodiment, a cleavable group can include a moiety that can be removed from a primer after amplification (or synthesis) upon exposure to ultraviolet light (i.e., bromodeoxyuridine). In another embodiment, a cleavable group can include methylated cytosine. Typically, methylated cytosine can be cleaved from a primer for example, after induction of amplification (or synthesis), upon sodium bisulfite treatment. In some embodiments, a cleavable moiety can include a restriction site. For example, a primer or target sequence can include a nucleic acid sequence that is specific to one or more restriction enzymes, and following amplification (or synthesis), the primer or target sequence can be treated with the one or more restriction enzymes such that the cleavable group is removed. Typically, one or more cleavable groups can be included at one or more locations with a target-specific primer, an amplified sequence, an adapter or a nucleic acid molecule of the sample.

[0039] As used herein, “cleavage step” and its derivatives, refers to any process by which a cleavable group is cleaved or otherwise removed from a target-specific primer, an amplified sequence, an adapter or a nucleic acid molecule of the sample. In some embodiments, the cleavage steps involves a chemical, thermal, photo-oxidative or digestive process.

[0040] As used herein, the term “hybridization” is consistent with its use in the art, and refers to the process whereby two nucleic acid molecules undergo base pairing interactions. Two nucleic acid molecule molecules are said to be hybridized when any portion of one nucleic acid molecule is base paired with any portion of the other nucleic acid molecule; it is not necessarily required that the two nucleic acid molecules be hybridized across their entire respective lengths and in some embodiments, at least one of the nucleic acid molecules can include portions that are not hybridized to the other nucleic acid molecule. The phrase “hybridizing under stringent conditions” and its variants refers to conditions under which hybridization of a target-specific primer to a target sequence occurs in the presence of high hybridization temperature and low ionic strength. In one exemplary embodiment, stringent hybridization conditions include an aqueous environment containing about 30 mM magnesium sulfate, about 300 mM Tris-sulfate at pH 8.9, and about 90 mM ammonium sulfate at about 60-68° C., or equivalents thereof. As used herein, the phrase “standard hybridization conditions” and its variants refers to conditions under which hybridization of a primer to an oligonucleotide (i.e., a target sequence), occurs in the presence of low hybridization temperature and high ionic strength. In one exemplary embodiment, standard hybridization conditions include an aqueous environment containing about 100 mM magnesium sulfate, about 500 mM Tris-sulfate at pH 8.9, and about 200 mM ammonium sulfate at about 50-55° C., or equivalents thereof.

[0041] As used herein, “GC content” and its derivatives, refers to the cytosine and guanine content of a nucleic acid molecule. The GC content of a target-specific primer (or adapter) of the disclosure is 85% or lower. More typically, the GC content of a target-specific primer or adapter of the disclosure is between 15-85%.

[0042] As used herein, the term “end” and its variants, when used in reference to a nucleic acid molecule, for example a target sequence or amplified target sequence, can include the terminal 30 nucleotides, the terminal 20 and even more typically the terminal 15 nucleotides of the nucleic acid molecule. A linear nucleic acid molecule comprised of linked series of contiguous nucleotides typically includes at least two ends. In some embodiments, one end of the nucleic acid molecule can include a 3′ hydroxyl group or its equivalent, and can be referred to as the “3′ end” and its derivatives. Optionally, the 3′ end includes a 3′ hydroxyl group that is not linked to a 5′ phosphate group of a mononucleotide pentose ring. Typically, the 3′ end includes one or more 5′ linked nucleotides located adjacent to the nucleotide including the unlinked 3′ hydroxyl group, typically the nucleotides located adjacent to the 3′ hydroxyl, typically the terminal 20 and even more typically the terminal 15 nucleotides. One or more linked nucleotides can be represented as a percentage of the nucleotides present in the oligonucleotide or can be provided as a number of linked nucleotides adjacent to the unlinked 3′ hydroxyl. For example, the 3′ end can include less than 50% of the nucleotide length of the oligonucleotide. In some embodiments, the 3′ end does not include any unlinked 3′ hydroxyl group but can include any moiety capable of serving as a site for attachment of nucleotides via primer extension and/or nucleotide polymerization. In some embodiments, the term “3′ end” for example when referring to a target-specific primer, can include the terminal 10 nucleotides, the terminal 5 nucleotides, the terminal 4, 3, 2 or fewer nucleotides at the 3′end. In some embodiments, the term “3′ end” when referring to a target-specific primer can include nucleotides located at nucleotide positions 10 or fewer from the 3′ terminus.

[0043] As used herein, “5′ end”, and its derivatives, refers to an end of a nucleic acid molecule, for example a target sequence or amplified target sequence, which includes a free 5′ phosphate group or its equivalent. In some embodiments, the 5′ end includes a 5′ phosphate group that is not linked to a 3′ hydroxyl of a neighboring mononucleotide pentose ring. Typically, the 5′ end includes to one or more linked nucleotides located adjacent to the 5′ phosphate, typically the 30 nucleotides located adjacent to the nucleotide including the 5′ phosphate group, typically the terminal 20 and even more typically the terminal 15 nucleotides. One or more linked nucleotides can be represented as a percentage of the nucleotides present in the oligonucleotide or can be provided as a number of linked nucleotides adjacent to the 5′ phosphate. For example, the 5′ end can be less than 50% of the nucleotide length of an oligonucleotide. In another exemplary embodiment, the 5′ end can include about 15 nucleotides adjacent to the nucleotide including the terminal 5′ phosphate. In some embodiments, the 5′ end does not include any unlinked 5′ phosphate group but can include any moiety capable of serving as a site of attachment to a a 3′ hydroxyl group, or to the 3′end of another nucleic acid molecule. In some embodiments, the term “5′ end” for example when referring to a target-specific primer, can include the terminal 10 nucleotides, the terminal 5 nucleotides, the terminal 4, 3, 2 or fewer nucleotides at the 5′end. In some embodiments, the term “5′ end” when referring to a target-specific primer can include nucleotides located at positions 10 or fewer from the 5′ terminus. In some embodiments, the 5′ end of a target-specific primer can include only non-cleavable nucleotides, for example nucleotides that do not contain one or more cleavable groups as disclosed herein, or a cleavable nucleotide as would be readily determined by one of ordinary skill in the art.

[0044] As used herein, “DNA barcode” or “DNA tagging sequence” and its derivatives, refers to a unique short (6-14 nucleotide) nucleic acid sequence within an adapter that can act as a ‘key’ to distinguish or separate a plurality of amplified target sequences in a sample. For the purposes of this disclosure, a DNA barcode or DNA tagging sequence can be incorporated into the nucleotide sequence of an adapter.

[0045] As used herein, the phrases “two rounds of target-specific hybridization” or “two rounds of target-specific selection” and their derivatives refers to any process whereby the same target sequence is subjected to two consecutive rounds of hybridization-based target-specific selection, wherein a target sequence is hybridized to a target-specific sequence. Each round of hybridization based target-specific selection can include multiple target-specific hybridizations to at least some portion of a target-specific sequence. In one exemplary embodiment, a round of target-specific selection includes a first target-specific hybridization involving a first region of the target sequence and a second target-specific hybridization involving a second region of the target sequence. The first and second regions can be the same or different. In some embodiments, each round of hybridization-based target-specific selection can include use of two target specific oligonucleotides (e.g., a forward target-specific primer and a reverse target-specific primer), such that each round of selection includes two target-specific hybridizations.

[0046] As used herein, “comparable maximal minimum melting temperatures” and its derivatives, refers to the melting temperature (Tm) of each nucleic acid fragment for a single adapter or target-specific primer after cleavage of the cleavable groups. The hybridization temperature of each nucleic acid fragment generated by a single adapter or target-specific primer is compared to determine the maximal minimum temperature required preventing hybridization of any nucleic acid fragment from the target-specific primer or adapter to the target sequence. Once the maximal hybridization temperature is known, it is possible to manipulate the adapter or target-specific primer, for example by moving the location of the cleavable group along the length of the primer, to achieve a comparable maximal minimum melting temperature with respect to each nucleic acid fragment.

[0047] As used herein, “addition only” and its derivatives, refers to a series of steps in which reagents and components are added to a first or single reaction mixture. Typically, the series of steps excludes the removal of the reaction mixture from a first vessel to a second vessel in order to complete the series of steps. An addition only process excludes the manipulation of the reaction mixture outside the vessel containing the reaction mixture. Typically, an addition-only process is amenable to automation and high-throughput.

[0048] As used herein, “synthesizing” and its derivatives, refers to a reaction involving nucleotide polymerization by a polymerase, optionally in a template-dependent fashion. Polymerases synthesize an oligonucleotide via transfer of a nucleoside monophosphate from a nucleoside triphosphate (NTP), deoxynucleoside triphosphate (dNTP) or dideoxynucleoside triphosphate (ddNTP) to the 3′ hydroxyl of an extending oligonucleotide chain. For the purposes of this disclosure, synthesizing includes to the serial extension of a hybridized adapter or a target-specific primer via transfer of a nucleoside monophosphate from a deoxynucleoside triphosphate.

[0049] As used herein, “polymerizing conditions” and its derivatives, refers to conditions suitable for nucleotide polymerization. In typical embodiments, such nucleotide polymerization is catalyzed by a polymerase. In some embodiments, polymerizing conditions include conditions for primer extension, optionally in a template-dependent manner, resulting in the generation of a synthesized nucleic acid sequence. In some embodiments, the polymerizing conditions include polymerase chain reaction (PCR). Typically, the polymerizing conditions include use of a reaction mixture that is sufficient to synthesize nucleic acids and includes a polymerase and nucleotides. The polymerizing conditions can include conditions for annealing of a target-specific primer to a target sequence and extension of the primer in a template dependent manner in the presence of a polymerase. In some embodiments, polymerizing conditions can be practiced using thermocycling. Additionally, polymerizing conditions can include a plurality of cycles where the steps of annealing, extending, and separating the two nucleic strands are repeated. Typically, the polymerizing conditions include a cation such as MgCl₂. Polymerization of one or more nucleotides to form a nucleic acid strand includes that the nucleotides be linked to each other via phosphodiester bonds, however, alternative linkages may be possible in the context of particular nucleotide analogs.

[0050] As used herein, the term “nucleic acid” refers to natural nucleic acids, artificial nucleic acids, analogs thereof, or combinations thereof, including polynucleotides and oligonucleotides. As used herein, the terms “polynucleotide” and “oligonucleotide” are used interchangeably and mean single-stranded and double-stranded polymers of nucleotides including, but not limited to, 2′-deoxyribonucleotides (nucleic acid) and ribonucleotides (RNA) linked by internucleotide phosphodiester bond linkages, e.g. 3′-5′ and 2′-5′, inverted linkages, e.g. 3′-3′ and 5′-5′, branched structures, or analog nucleic acids. Polynucleotides have associated counter ions, such as H⁺, NH₄⁺, trialkylammonium, Mg²⁺, Na⁺ and the like. An oligonucleotide can be composed entirely of deoxyribonucleotides, entirely of ribonucleotides, or chimeric mixtures thereof. Oligonucleotides can be comprised of nucleobase and sugar analogs. Polynucleotides typically range in size from a few monomeric units, e.g. 5-40, when they are more commonly frequently referred to in the art as oligonucleotides, to several thousands of monomeric nucleotide units, when they are more commonly referred to in the art as polynucleotides; for purposes of this disclosure, however, both oligonucleotides and polynucleotides may be of any suitable length. Unless denoted otherwise, whenever a oligonucleotide sequence is represented, it will be understood that the nucleotides are in 5′ to 3′ order from left to right and that “A” denotes deoxyadenosine, “C” denotes deoxycytidine, “G” denotes deoxyguanosine, “T” denotes thymidine, and “U” denotes deoxyuridine. Oligonucleotides are said to have “5′ ends” and “3′ ends” because mononucleotides are typically reacted to form oligonucleotides via attachment of the 5′ phosphate or equivalent group of one nucleotide to the 3′ hydroxyl or equivalent group of its neighboring nucleotide, optionally via a phosphodiester or other suitable linkage.

[0051] As defined herein, the term “nick translation” and its variants comprise the translocation of one or more nicks or gaps within a nucleic acid strand to a new position along the nucleic acid strand. In some embodiments, a nick can be formed when a double stranded adapter is ligated to a double stranded amplified target sequence. In one example, the primer can include at its 5′ end, a phosphate group that can ligate to the double stranded amplified target sequence, leaving a nick between the adapter and the amplified target sequence in the complementary strand. In some embodiments, nick translation results in the movement of the nick to the 3′ end of the nucleic acid strand. In some embodiments, moving the nick can include performing a nick translation reaction on the adapter-ligated amplified target sequence. In some embodiments, the nick translation reaction can be a coupled 5′ to 3′ DNA polymerization/degradation reaction, or coupled to a 5′ to 3′ DNA polymerization/strand displacement reaction. In some embodiments, moving the nick can include performing a DNA strand extension reaction at the nick site. In some embodiments, moving the nick can include performing a single strand exonuclease reaction on the nick to form a single stranded portion of the adapter-ligated amplified target sequence and performing a DNA strand extension reaction on the single stranded portion of the adapter-ligated amplified target sequence to a new position. In some embodiments, a nick is formed in the nucleic acid strand opposite the site of ligation.

[0052] As used herein, the term “polymerase chain reaction” (“PCR”) refers to the method of K. B. Mullis U.S. Pat. Nos. 4,683,195 and 4,683,202, hereby incorporated by reference, which describe a method for increasing the concentration of a segment of a polynucleotide of interest in a mixture of expressed RNA or cDNA without cloning or purification. This process for amplifying the polynucleotide of interest consists of introducing a large excess of two oligonucleotide primers to the DNA mixture containing the desired polynucleotide of interest, followed by a precise sequence of thermal cycling in the presence of a DNA polymerase. The two primers are complementary to their respective strands of the double stranded polynucleotide of interest. To effect amplification, the mixture is denatured and the primers then annealed to their complementary sequences within the polynucleotide of interest molecule. Following annealing, the primers are extended with a polymerase to form a new pair of complementary strands. The steps of denaturation, primer annealing and polymerase extension can be repeated many times (i.e., denaturation, annealing and extension constitute one “cycle”; there can be numerous “cycles”) to obtain a high concentration of an amplified segment of the desired polynucleotide of interest. The length of the amplified segment of the desired polynucleotide of interest (amplicon) is determined by the relative positions of the primers with respect to each other, and therefore, this length is a controllable parameter. By virtue of repeating the process, the method is referred to as the “polymerase chain reaction” (hereinafter “PCR”). Because the desired amplified segments of the polynucleotide of interest become the predominant nucleic acid sequences (in terms of concentration) in the mixture, they are said to be “PCR amplified”. As defined herein, target nucleic acid molecules within a sample including a plurality of target nucleic acid molecules are amplified via PCR. In a modification to the method discussed above, the target nucleic acid molecules can be PCR amplified using a plurality of different primer pairs, in some cases, one or more primer pairs per target nucleic acid molecule of interest, thereby forming a multiplex PCR reaction. Using multiplex PCR, it is possible to simultaneously amplify multiple nucleic acid molecules of interest from a sample to form amplified target sequences. It is also possible to detect the amplified target sequences by several different methodologies (e.g., quantitation with a bioanalyzer or qPCR, hybridization with a labeled probe; incorporation of biotinylated primers followed by avidin-enzyme conjugate detection; incorporation of ³²P-labeled deoxynucleotide triphosphates, such as dCTP or dATP, into the amplified target sequence). Any oligonucleotide sequence can be amplified with the appropriate set of primers, thereby allowing for the amplification of target nucleic acid molecules from RNA, cDNA, formalin-fixed paraffin-embedded DNA, fine-needle biopsies and various other sources. In particular, the amplified target sequences created by the multiplex PCR process as disclosed herein, are themselves efficient substrates for subsequent PCR amplification or various downstream assays or manipulations.

[0053] As defined herein “multiplex amplification” refers to selective and non-random amplification of two or more target sequences within a sample using at least one target-specific primer. In some embodiments, multiplex amplification is performed such that some or all of the target sequences are amplified within a single reaction vessel. The “plexy” or “plex” of a given multiplex amplification refers to the number of different target-specific sequences that are amplified during that single multiplex amplification. In some embodiments, the plexy can be about 12-plex, 24-plex, 48-plex, 74-plex, 96-plex, 120-plex, 144-plex, 168-plex, 192-plex, 216-plex, 240-plex, 264-plex, 288-plex, 312-plex, 336-plex, 360-plex, 384-plex, or 398-plex.

[0054] The practice of the present subject matter may employ, unless otherwise indicated, conventional techniques and descriptions of organic chemistry, molecular biology (including recombinant techniques), cell biology, and biochemistry, which are within the skill of the art. Such conventional techniques include, but are not limited to, preparation of synthetic polynucleotides, polymerization techniques, chemical and physical analysis of polymer particles, preparation of nucleic acid libraries, nucleic acid sequencing and analysis, and the like. Specific illustrations of suitable techniques can be used by reference to the examples provided herein. Other equivalent conventional procedures can also be used. Such conventional techniques and descriptions can be found in standard laboratory manuals such as Genome Analysis: A Laboratory Manual Series (Vols. I-IV), PCR Primer: A Laboratory Manual, and Molecular Cloning: A Laboratory Manual (all from Cold Spring Harbor Laboratory Press), Hermanson, Bioconjugate Techniques, Second Edition (Academic Press, 2008); Merkus, Particle Size Measurements (Springer, 2009); Rubinstein and Colby, Polymer Physics (Oxford University Press, 2003); and the like.

[0055] We have developed a multiplex next generation sequencing workflow to measure expression of genes involved in immune response, e.g., checkpoint pathways, T cell related signaling pathways, markers of different tumor infiltrating lymphocyte (TIL) subsets, and tumor markers, in order to determine immune response in a sample. The immune response assay compositions and methods of the invention offer a specific and robust solution for biomarker screening and for understanding mechanisms involved with tumor immune response. Thus, provided are multiplex gene expression compositions for multiplex library preparation and use in conjunction with next generation sequencing technologies and workflow solutions (e.g., Ion Torrent™ NGS workflow), manual or automated, to evaluate pathways that shield tumors from the immune response.

[0056] Thus, provided are compositions for a single stream multiplex determination of an immune response in a sample. In some embodiments, the composition consists of a plurality of sets of primer pair reagents directed to a plurality of target sequences to measure the expression levels of the targets in the sample, wherein the target genes are selected from immune response genes consisting of the following function: checkpoint pathways, T cell related signaling pathways, markers of tumor infiltrating lymphocytes (TILS), tumor markers, and housekeeping genes. In some embodiments, the target genes are selected from immune response genes consisting of one or more function of Table A. In some embodiments, the target genes are selected from immune response genes consisting of the following function: immune checkpoint pathways and targets; T and B cell signaling genes, markers of lymphocyte subsets, interferon signaling genes, cytokine signaling genes; tumor markers, tumor antigens, proliferation markers; and housekeeping genes. In some embodiments, the target genes are selected from immune response genes that elucidate T and B lymphocyte functions, from activation to antigen processing, including, e.g., genes consisting of the following function: antigen presentation, antigen processing, innate immune response, leukocyte inhibition, leukocyte migration, lymphocyte activation, lymphocyte development, lymphocyte infiltrate, B cell receptor signaling, T cell receptor signaling, T cell regulation and TCR coexpression. In some embodiments, the target genes are selected from immune response genes that elucidate the level of inflammation and activation and co-op by helper cells, including, e.g., genes consisting of the following function: chemokine signaling, cytokine signaling, interferon signaling, Type I interferon signaling, and Type II interferon signaling. In some embodiments, the target genes identify the presence of various relevant cell types, including, e.g., genes selected from immune response genes consisting of the following function: B cell marker, dendritic cell, dendritic cell/macrophage, helper T cell, macrophage, myeloid, neutrophil, NK activation, NK cell, and T cell differentiation. In some embodiments, the target genes elucidate the mechanism of action, including, e.g., genes selected from immune response genes consisting of the following function: checkpoint pathway, PD-signaling, and drug target. In some embodiments, the target genes demonstrate the proliferative activity and/or stemness characteristics of tumor cells, including, e.g., genes selected from immune response genes consisting of the following function: adhesion/migration, apoptosis, proliferation, tumor antigen, and tumor marker. In total, the various functions of genes comprising the provided multiplex panel of the invention provide a comprehensive picture of complex activities of the tumor microenvironment.

[0057] In some embodiments, immune response target sequences are selected from immune response genes consisting of the following function: antigen presentation, antigen processing, innate immune response, leukocyte inhibition, leukocyte migration, lymphocyte activation, lymphocyte development, lymphocyte infiltrate, B cell receptor signaling, T cell receptor signaling, T cell regulation, TCR coexpression, chemokine signaling, cytokine signaling, interferon signaling, Type I interferon signaling, Type II interferon signaling, B cell marker, dendritic cell, dendritic cell/macrophage, helper T cell, macrophage, myeloid, neutrophil, NK activation, NK cell, T cell differentiation, checkpoint pathway, PD-signaling, drug target, adhesion/migration, apoptosis, proliferation, tumor antigen, and tumor marker.

TABLE A
Immune Response Genes

| NCBI Accession No | Gene ID | Gene Function |
|---|---|---|
| NM_001025091 | ABCF1 | Housekeeping |
| NM_078481 | ADGRE5 | Adhesion, migration |
| NM_000675 | ADORA2A | Checkpoint pathway |
| NM_001623 | AIF1 | Macrophage |
| NM_001014431 | AKT1 | Tumor marker |
| NM_001141 | ALOX15B | Macrophage |
| NM_000045 | ARG1 | Myeloid marker |
| NM_021913 | AXL | Innate immune response |
| NM_018644 | B3GAT1 | NK activation |
| NM_182482 | BAGE | Tumor antigen |
| NM_006399 | BATF | Helper T cells |
| NM_000633 | BCL2 | Apoptosis |
| NM_138621 | BCL2L11 | Apoptosis |
| NM_001706 | BCL6 | Type II interferon signaling |
| NM_007300 | BRCA1 | Tumor marker |
| NM_000059 | BRCA2 | Tumor marker |
| NM_004335 | BST2 | Type I interferon signaling |
| NM_181780 | BTLA | Checkpoint pathway |
| NM_004336 | BUB1 | Proliferation |
| NM_022153 | C10orf54 | Checkpoint pathway |
| NM_015991 | C1QA | Innate immune response |
| NM_000491 | C1QB | Innate immune response |
| NM_000717 | CA4 | Neutrophil |
| NM_170662 | CBLB | T cell receptor signaling |
| NM_002987 | CCL17 | Chemokine signaling |
| NM_002988 | CCL18 | Lymphocyte infiltrate |
| NM_002982 | CCL2 | Lymphocyte infiltrate |
| NM_004591 | CCL20 | Chemokine signaling |
| NM_002989 | CCL21 | Lymphocyte infiltrate |
| NM_002990 | CCL22 | Chemokine signaling |
| NM_002983 | CCL3 | Lymphocyte infiltrate |
| NM_002984 | CCL4 | Lymphocyte infiltrate |
| NM_002985 | CCL5 | Lymphocyte infiltrate |
| NM_004701 | CCNB2 | Proliferation |
| NM_001295 | CCR1 | Cytokine signaling |
| NM_001123396 | CCR2 | Helper T cells |
| NM_005508 | CCR4 | Chemokine signaling |
| NM_001100168 | CCR5 | Lymphocyte infiltrate |
| NM_004367 | CCR6 | Chemokine signaling |
| NM_001838 | CCR7 | TCR coexpression |
| NM_000591 | CD14 | Dendridic cell, macrophage |
| NM_007053 | CD160 | Checkpoint pathway |
| NM_004244 | CD163 | Macrophage |
| NM_001178098 | CD19 | B cell marker |
| NM_001765 | CD1C | Antigen presentation |
| NM_001766 | CD1D | Antigen presentation |
| NM_001767 | CD2 | Lymphocyte infiltrate |
| NM_021155 | CD209 | Dendridic cell, macrophage |
| NM_001771 | CD22 | B cell marker |
| NM_006566 | CD226 | Adhesion, migration |
| NM_001166663 | CD244 | Checkpoint pathway |
| NM_198053 | CD247 | TCR coexpression |
| NM_001242 | CD27 | Drug target |
| NM_014143 | CD274 | Checkpoint pathway |
| NM_001024736 | CD276 | Checkpoint pathway |
| NM_006139 | CD28 | Checkpoint pathway |
| NM_001772 | CD33 | Myeloid marker |
| NM_001774 | CD37 | Lymphocyte infiltrate |
| NM_001775 | CD38 | Adhesion, migration |
| NM_000732 | CD3D | TCR coexpression |
| NM_000733 | CD3E | TCR coexpression |
| NM_000073 | CD3G | TCR coexpression |
| NM_000616 | CD4 | Helper T cells |
| NM_001250 | CD40 | Drug target |
| NM_000074 | CD40LG | T cell receptor signaling |
| NM_000610 | CD44 | Adhesion, migration |
| NM_001777 | CD47 | Adhesion, migration |
| NM_001778 | CD48 | Checkpoint pathway |
| NM_001803 | CD52 | Lymphocyte infiltrate |
| NM_001040033 | CD53 | Adhesion, migration |
| NM_006725 | CD6 | TCR coexpression |
| NM_001780 | CD63 | Lymphocyte infiltrate |
| NM_001251 | CD68 | Macrophage |
| NM_001781 | CD69 | Checkpoint pathway |
| NM_001252 | CD70 | Drug target |
| NM_001025159 | CD74 | Antigen processing |
| NM_001783 | CD79A | B cell receptor signaling |
| NM_001039933 | CD79B | B cell receptor signaling |
| NM_005191 | CD80 | Checkpoint pathway |
| NM_004233 | CD83 | Antigen presentation |
| NM_175862 | CD86 | Checkpoint pathway |
| NM_171827 | CD8A | TCR coexpression |
| NM_172213 | CD8B | TCR coexpression |
| NM_001786 | CDK1 | Proliferation |
| NM_000077 | CDKN2A | Tumor marker |
| NM_005192 | CDKN3 | Proliferation |
| NM_001712 | CEACAM1 | Checkpoint pathway |
| NM_001816 | CEACAM8 | Myeloid marker |
| NM_000246 | CIITA | Type II interferon signaling |
| NM_130441 | CLEC4C | Dendridic cell |
| NM_001142345 | CMKLR1 | Dendridic cell, macrophage |
| NM_007074 | CORO1A | Lymphocyte infiltrate |
| NM_019604 | CRTAM | TCR coexpression |
| NM_005211 | CSF1R | Cytokine signaling |
| NM_000395 | CSF2RB | Cytokine signaling |
| NM_001327 | CTAG1B | Tumor antigen |
| ENST00000369585 | CTAG2 | Tumor antigen |
| NM_005214 | CTLA4 | Drug target |
| NM_004079 | CTSS | Lymphocyte infiltrate |
| NM_002996 | CX3CL1 | Type II interferon signaling |
| ENST00000399220 | CX3CR1 | Lymphocyte infiltrate |
| ENST00000435290 | CX3CR1 | Lymphocyte infiltrate |
| ENST00000541347 | CX3CR1 | Lymphocyte infiltrate |
| NM_001171174 | CX3CR1 | Lymphocyte infiltrate |
| NM_001511 | CXCL1 | Chemokine signaling |
| NM_001565 | CXCL10 | Type II interferon signaling |
| NM_005409 | CXCL11 | Type II interferon signaling |
| NM_006419 | CXCL13 | Type II interferon signaling |
| NM_000584 | CXCL8 | Cytokine signaling |
| NM_002416 | CXCL9 | Type II interferon signaling |
| NM_001557 | CXCR2 | Chemokine signaling |
| NM_001504 | CXCR3 | Chemokine signaling |
| NM_003467 | CXCR4 | Lymphocyte infiltrate |
| NM_001716 | CXCR5 | Type II interferon signaling |
| NM_006564 | CXCR6 | Lymphocyte infiltrate |
| NM_000397 | CYBB | Type II interferon signaling |
| NM_014314 | DDX58 | Interferon signaling |
| NM_032564 | DGAT2 | Neutrophil |
| NM_007329 | DMBT1 | Innate immune response |
| NM_005755 | EBI3 | T cell regulation |
| NM_005227 | EFNA4 | Tumor marker |
| NM_005228 | EGFR | Tumor marker |
| NM_000399 | EGR2 | T cell differentiation |
| NM_004430 | EGR3 | Tumor marker |
| NM_001135651 | EIF2AK2 | Type II interferon signaling |
| NM_001098175 | ENTPD1 | Checkpoint pathway |
| NM_005442 | EOMES | Checkpoint pathway |
| NM_000043 | FAS | B cell receptor signaling |
| NM_000639 | FASLG | Type II interferon signaling |
| NM_004106 | FCER1G | Lymphocyte infiltrate |
| NM_000566 | FCGR1A | B cell marker |
| NM_004001 | FCGR2B | B cell marker |
| NM_000569 | FCGR3A | Macrophage |
| NM_000570 | FCGR3B | NK activation |
| NM_001184866 | FCRLA | B cell marker |
| NM_021953 | FOXM1 | Proliferation |
| NM_002015 | FOXO1 | PD-1 signaling, tumor marker |
| NM_014009 | FOXP3 | T cell regulation |
| NM_002033 | FUT4 | Myeloid marker, stem cell |
| NM_001465 | FYB | Lymphocyte infiltrate |
| NM_000402 | G6PD | Housekeeping |
| NM_052850 | GADD45GIP1 | Apoptosis |
| NM_001040663 | GAGE1, | Tumor antigen |
| | GAGE12I, | |
| | GAGE12F | |
| NM_001098413 | GAGE10 | Tumor antigen |
| NM_001098406 | GAGE12J | Tumor antigen |
| NM_001098412 | GAGE13 | Tumor antigen |
| NM_001472 | GAGE2C, | Tumor antigen |
| | GAGE2A, | |
| | GAGE2E | |
| NM_001002295 | GATA3 | Helper T cells |
| NM_002053 | GBP1 | Type II interferon signaling |
| NM_006433 | GNLY | NK activation |
| NM_001098200 | GPR18 | TCR coexpression |
| NM_004810 | GRAP2 | TCR coexpression |
| NM_000181 | GUSB | Housekeeping |
| NM_006144 | GZMA | Lymphocyte infiltrate |
| NM_004131 | GZMB | Lymphocyte infiltrate |
| NM_033423 | GZMH | Lymphocyte infiltrate |
| NM_002104 | GZMK | Lymphocyte infiltrate |
| NM_032782 | HAVCR2 | Checkpoint pathway |
| NM_017912 | HERC6 | Dendridic cell |
| NM_000601 | HGF | Cytokine signaling |
| NM_001530 | HIF1A | PD-1 signaling, tumor marker |
| NM_002116 | HLA-A | Antigen processing |
| NM_005514 | HLA-B | Antigen processing |
| NM_002117 | HLA-C | Antigen processing |
| NM_006120 | HLA-DMA | Antigen processing |
| NM_002118 | HLA-DMB | Antigen processing |
| NM_002119 | HLA-DOA | Antigen processing |
| NM_002120 | HLA-DOB | Antigen processing |
| NM_033554 | HLA-DPA1 | Antigen processing |
| NM_002121 | HLA-DPB1 | Antigen processing |
| NM_002122 | HLA-DQA1 | Antigen processing |
| NM_020056 | HLA-DQA2 | Antigen processing |
| NM_001198858 | HLA-DQB2 | Antigen processing |
| NM_019111 | HLA-DRA | Antigen processing |
| NM_002124 | HLA-DRB1 | Antigen processing |
| NM_005516 | HLA-E | Antigen processing |
| NM_001098479 | HLA-F | Antigen processing |
| NR_026972 | HLA-F-AS1 | Antigen processing |
| NM_002127 | HLA-G | Antigen processing |
| NM_000190 | HMBS | Housekeeping |
| NM_000201 | ICAM1 | Type II interferon signaling |
| NM_012092 | ICOS | Checkpoint pathway |
| NM_015259 | ICOSLG | Checkpoint pathway |
| NM_002166 | ID2 | T cell regulation |
| NM_002167 | ID3 | T cell regulation |
| NM_002164 | IDO1 | Drug target |
| NM_194294 | IDO2 | Checkpoint pathway |
| NM_005532 | IFI27 | Type I interferon signaling |
| NM_005533 | IFI35 | Interferon signaling |
| NM_006820 | IFI44L | Interferon signaling |
| NM_022873 | IFI6 | Interferon signaling |
| NM_022168 | IFIH1 | Innate immune response |
| NM_001548 | IFIT1 | Type I interferon signaling |
| NM_001547 | IFIT2 | Cytokine signaling |
| NM_001031683 | IFIT3 | Type I interferon signaling |
| NM_003641 | IFITM1 | Type I interferon signaling |
| NM_006435 | IFITM2 | Type I interferon signaling |
| NM_021268 | IFNA17 | T cell receptor signaling |
| NM_002176 | IFNB1 | Type II interferon signaling |
| NM_000619 | IFNG | Type II interferon signaling |
| NM_000875 | IGF1R | Adhesion, migration |
| NM_005849 | IGSF6 | Lymphocyte infiltrate |
| NM_006060 | IKZF1 | Lymphocyte development |
| NM_016260 | IKZF2 | Lymphocyte development |
| NM_012481 | IKZF3 | TCR coexpression |
| NM_022465 | IKZF4 | Lymphocyte development |
| NM_000572 | IL10 | Drug target |
| NM_001558 | IL10RA | Lymphocyte infiltrate |
| NM_000882 | IL12A | Drug target |
| NM_002187 | IL12B | Drug target |
| NM_002188 | IL13 | Cytokine signaling |
| NM_000585 | IL15 | T cell regulation |
| NM_002190 | IL17A | Helper T cells |
| NM_052872 | IL17F | Dendridic cell, macrophage |
| NM_001562 | IL18 | T cell regulation |
| NM_000575 | IL1A | Cytokine signaling |
| NM_000576 | IL1B | Type II interferon signaling |
| NM_000586 | IL2 | Drug target |
| NM_021803 | IL21 | Cytokine signaling |
| NM_020525 | IL22 | T cell regulation |
| NM_016584 | IL23A | Dendridic cell, macrophage |
| NM_000417 | IL2RA | Cytokine signaling |
| NM_000878 | IL2RB | TCR coexpression |
| NM_000206 | IL2RG | Lymphocyte infiltrate |
| NM_002183 | IL3RA | Dendridic cell |
| NM_000589 | IL4 | Cytokine signaling |
| NM_000600 | IL6 | Cytokine signaling |
| NM_000880 | IL7 | Cytokine signaling |
| NM_002185 | IL7R | TCR coexpression |
| NM_002198 | IRF1 | Type II interferon signaling |
| NM_002460 | IRF4 | Interferon signaling |
| NM_006084 | IRF9 | Type II interferon signaling |
| NM_005544 | IRS1 | Tumor marker |
| NM_005101 | ISG15 | Type I interferon signaling |
| NM_002201 | ISG20 | Type I interferon signaling |
| NM_181501 | ITGA1 | Adhesion, migration |
| NM_002208 | ITGAE | Adhesion, migration |
| NM_002209 | ITGAL | Leukocyte migration |
| NM_001145808 | ITGAM | Leukocyte migration |
| NM_000887 | ITGAX | Dendridic cell |
| NM_002211 | ITGB1 | Adhesion, migration |
| NM_000211 | ITGB2 | Lymphocyte infiltrate |
| NM_000889 | ITGB7 | Leukocyte migration |
| NM_005546 | ITK | TCR coexpression |
| NM_001098526 | JAML | Lymphocyte infiltrate |
| NM_144646 | JCHAIN | B cell marker |
| NM_014736 | KIAA0101 | Proliferation |
| NM_014218 | KIR2DL1 | Drug target |
| ENST00000344867 | KIR2DL2 | NK cell marker |
| NM_015868 | KIR2DL3 | NK cell marker |
| NM_016270 | KLF2 | T cell regulation, trafficking |
| NM_002258 | KLRB1 | NK activation |
| NM_002262 | KLRD1 | Drug target |
| NM_016523 | KLRF1 | NK activation |
| NM_005810 | KLRG1 | NK activation |
| NM_007360 | KLRK1 | NK activation |
| NM_032045 | KREMEN1 | Neutrophil |
| NM_000424 | KRT5 | Tumor marker |
| NM_005556 | KRT7 | Tumor marker |
| NM_002286 | LAG3 | Drug target |
| NM_005561 | LAMP1 | Lymphocyte infiltrate |
| NM_014398 | LAMP3 | TCR coexpression |
| NM_006762 | LAPTM5 | Lymphocyte infiltrate |
| NM_001042771 | LCK | TCR coexpression |
| NM_005564 | LCN2 | Innate immune response |
| NM_001110533 | LEXM | T cell differentiation |
| NM_001081637 | LILRB1 | Leukocyte inhibition |
| NM_001080978 | LILRB2 | Lymphocyte infiltrate |
| NM_170707 | LMNA | Housekeeping |
| NM_052972 | LRG1 | Neutrophil |
| NM_002332 | LRP1 | Housekeeping |
| NM_007161 | LST1 | Leukocyte inhibition |
| NM_002348 | LY9 | Lymphocyte infiltrate |
| NM_000239 | LYZ | Innate immune response |
| NM_002355 | M6PR | T cell regulation |
| NM_002358 | MAD2L1 | Proliferation |
| NM_130760 | MADCAM1 | Adhesion, migration |
| NM_004988 | MAGEA1 | Tumor antigen |
| NM_021048 | MAGEA10 | Tumor antigen |
| NM_005367 | MAGEA12 | Tumor antigen |
| NM_005362 | MAGEA3 | Tumor antigen |
| NM_001011548 | MAGEA4 | Tumor antigen |
| NM_016249 | MAGEC2 | Tumor antigen |
| NM_002745 | MAPK1 | Tumor marker |
| NM_139012 | MAPK14 | Innate immune response |
| NM_014791 | MELK | Proliferation |
| NM_002415 | MIF | Innate immune response |
| NM_002417 | MKI67 | Proliferation |
| NM_005511 | MLANA | Tumor antigen |
| NM_004530 | MMP2 | Tumor marker |
| NM_004994 | MMP9 | Tumor marker |
| NM_000250 | MPO | Myeloid marker |
| NM_002438 | MRC1 | Dendridic cell, macrophage |
| NM_021950 | MS4A1 | Drug target |
| NM_004958 | MTOR | PD-1 signaling, tumor marker |
| NM_001178046 | MX1 | Interferon signaling |
| NM_002467 | MYC | Tumor marker |
| NM_181351 | NCAM1 | Adhesion, migration |
| NM_000265 | NCF1 | Chemokine signaling |
| NM_004829 | NCR1 | NK cell marker |
| NM_147130 | NCR3 | NK cell marker |
| NM_001042724 | NECTIN2 | Adhesion, migration |
| NM_172387 | NFATC1 | PD-1 signaling |
| NM_020529 | NFKBIA | T cell receptor signaling |
| NM_005601 | NKG7 | Lymphocyte infiltrate |
| NM_000625 | NOS2 | Innate immune response |
| NM_000435 | NOTCH3 | Tumor marker |
| NM_003873 | NRP1 | Dendridic cell |
| NM_002526 | NT5E | Checkpoint pathway |
| NM_006181 | NTN3 | B cell marker |
| NM_016816 | OAS1 | Type II interferon signaling |
| NM_016817 | OAS2 | Interferon signaling |
| NM_006187 | OAS3 | Interferon signaling |
| NM_005018 | PDCD1 | Drug target |
| NM_025239 | PDCD1LG2 | Checkpoint pathway |
| NM_000442 | PECAM1 | Adhesion, migration |
| NM_002632 | PGF | Tumor marker |
| NM_006218 | PIK3CA | PD-1 signaling, tumor marker |
| NM_005026 | PIK3CD | PD-1 signaling, tumor marker |
| NM_006928 | PMEL | Drug target |
| NM_000937 | POLR2A | Housekeeping |
| NM_006235 | POU2AF1 | B cell marker |
| NM_001198 | PRDM1 | PD-1 signaling |
| NM_005041 | PRF1 | NK activation |
| NM_002800 | PSMB9 | Type II interferon signaling |
| NM_000314 | PTEN | PD-1 signaling, tumor marker |
| NM_000963 | PTGS2 | Tumor marker |
| NM_002821 | PTK7 | Tumor marker |
| NM_002834 | PTPN11 | PD-1 signaling, tumor marker |
| NM_080548 | PTPN6 | T cell receptor signaling |
| NM_001199797 | PTPN7 | Lymphocyte infiltrate |
| NM_002838 | PTPRC | Lymphocyte infiltrate |
| ENST00000326294 | PTPRCAP | TCR coexpression |
| NM_006505 | PVR | Checkpoint pathway |
| NM_002863 | PYGL | Neutrophil |
| NM_000321 | RB1 | Tumor marker |
| NM_005060 | RORC | Helper T cells |
| NM_001010 | RPS6 | Tumor marker |
| NM_002964 | S100A8 | Myeloid marker, MDSC |
| NM_002965 | S100A9 | Myeloid marker, MDSC |
| NM_015474 | SAMHD1 | Lymphocyte infiltrate |
| NM_004168 | SDHA | Housekeeping |
| NM_000655 | SELL | Leukocyte migration |
| NM_002351 | SH2D1A | Lymphocyte activation |
| NM_053282 | SH2D1B | Lymphocyte activation |
| NM_014450 | SIT1 | Lymphocyte infiltrate |
| NM_003930 | SKAP2 | B cell marker |
| NM_021181 | SLAMF7 | Drug target |
| NM_020125 | SLAMF8 | Lymphocyte infiltrate |
| NM_005985 | SNAI1 | Tumor marker, stemness |
| NM_003068 | SNAI2 | Tumor marker, stemness |
| NM_002727 | SRGN | Lymphocyte infiltrate |
| NM_003147 | SSX2 | Tumor antigen |
| NM_007315 | STAT1 | Type II interferon signaling |
| NM_139276 | STAT3 | Drug target |
| NM_003151 | STAT4 | Helper T cells |
| NM_003152 | STAT5A | Cytokine signaling |
| NM_003153 | STAT6 | Helper T cells |
| NM_054114 | TAGAP | Lymphocyte infiltrate |
| NM_000593 | TAP1 | Type II interferon signaling |
| NM_001003806 | TARP | Lymphocyte infiltrate |
| NM_003194 | TBP | Housekeeping |
| NM_013351 | TBX21 | Type II interferon signaling |
| NM_003202 | TCF7 | Tumor marker |
| NM_005651 | TDO2 | Checkpoint pathway |
| NM_001128148 | TFRC | Housekeeping |
| NM_000660 | TGFB1 | Checkpoint pathway |
| NM_173799 | TIGIT | TCR coexpression |
| NM_003265 | TLR3 | Dendridic cell |
| NM_016562 | TLR7 | Innate immune response |
| NM_138636 | TLR8 | Lymphocyte infiltrate |
| NM_017442 | TLR9 | Drug target |
| NM_000594 | TNF | Checkpoint pathway |
| NM_014350 | TNFAIP8 | Lymphocyte infiltrate |
| NM_003820 | TNFRSF14 | Checkpoint pathway |
| NM_001192 | TNFRSF17 | B cell marker |
| NM_004195 | TNFRSF18 | Drug target |
| NM_003327 | TNFRSF4 | Drug target |
| NM_001561 | TNFRSF9 | Drug target |
| NM_003810 | TNFSF10 | Apoptosis |
| NM_006573 | TNFSF13B | B cell marker |
| NM_003807 | TNFSF14 | Checkpoint pathway |
| NM_005092 | TNFSF18 | Checkpoint pathway |
| NM_003326 | TNFSF4 | Checkpoint pathway |
| NM_003811 | TNFSF9 | Cytokine signaling |
| NM_001067 | TOP2A | Proliferation |
| NM_003722 | TP63 | Tumor marker |
| NM_012101 | TRIM29 | Tumor marker |
| NM_178014 | TUBB | Housekeeping |
| NM_000474 | TWIST1 | Tumor marker, stemness |
| NM_198125 | TYROBP | Lymphocyte infiltrate |
| NM_001078 | VCAM1 | Leukocyte migration |
| NM_001171623 | VEGFA | Chemokine signaling |
| NM_024626 | VTCN1 | Checkpoint pathway |
| NM_001097594 | XAGE1B | Tumor antigen |
| NM_001079 | ZAP70 | T cell receptor signaling |
| NM_025224 | ZBTB46 | Dendridic cell |
| NM_001174093 | ZEB1 | Tumor marker, stemness |

[0058] In some embodiments, immune response target sequences are selected from immune response genes consisting of the following functions: antigen presentation, antigen processing, innate immune response, leukocyte inhibition, leukocyte migration, lymphocyte activation, lymphocyte development, lymphocyte infiltrate, B cell receptor signaling, T cell receptor signaling, T cell regulation, TCR coexpression chemokine signaling, cytokine signaling, interferon signaling, Type I interferon signaling, Type II interferon signaling, B cell marker, dendritic cell, dendritic cell/macrophage, helper T cell, macrophage, myeloid, neutrophil, NK activation, NK cell, T cell differentiation, checkpoint pathway, PD-signaling, and drug target. In some embodiments, immune response target sequences are selected from immune response genes consisting of the following function: antigen presentation, antigen processing, innate immune response, leukocyte inhibition, leukocyte migration, lymphocyte activation, lymphocyte development, lymphocyte infiltrate, B cell receptor signaling, T cell receptor signaling, T cell regulation, TCR coexpression, chemokine signaling, cytokine signaling, interferon signaling, Type I interferon signaling, Type II interferon signaling, B cell marker, dendritic cell, dendritic cell/macrophage, helper T cell, macrophage, myeloid, neutrophil, NK activation, NK cell, T cell differentiation, adhesion/migration, apoptosis, proliferation, tumor antigen, and tumor marker. In some embodiments, immune response target sequences are selected from immune response genes consisting of the following function: antigen presentation, antigen processing, innate immune response, leukocyte inhibition, leukocyte migration, lymphocyte activation, lymphocyte development, lymphocyte infiltrate, B cell receptor signaling, T cell receptor signaling, T cell regulation, TCR coexpression, checkpoint pathway, PD-signaling, drug target, adhesion/migration, apoptosis, proliferation, tumor antigen, and tumor marker. In some embodiments, immune response target sequences are selected from immune response genes consisting of the following function: antigen presentation, antigen processing, innate immune response, leukocyte inhibition, leukocyte migration, lymphocyte activation, lymphocyte development, lymphocyte infiltrate, B cell receptor signaling, T cell receptor signaling, T cell regulation, TCR coexpression, chemokine signaling, cytokine signaling, interferon signaling, Type I interferon signaling, Type II interferon signaling, B cell marker, dendritic cell, dendritic cell/macrophage, helper T cell, macrophage, myeloid, neutrophil, NK activation, NK cell, T cell differentiation, checkpoint pathway, PD-signaling, drug target, adhesion/migration, apoptosis, proliferation, tumor antigen, and tumor marker. In some embodiments, immune response target sequences are selected from immune response genes consisting of the following function: chemokine signaling, cytokine signaling, interferon signaling, Type I interferon signaling, Type II interferon signaling, B cell marker, dendritic cell, dendritic cell/macrophage, helper T cell, macrophage, myeloid, neutrophil, NK activation, NK cell, T cell differentiation, checkpoint pathway, PD-signaling, drug target, adhesion/migration, apoptosis, proliferation, tumor antigen, and tumor marker.

[0059] In certain embodiments, target immune response sequences are directed to sequences having aberrant expression associated with cancer. In some embodiments, the target sequences or amplified target sequences are directed to sequences having aberrant expression associated with one or more solid tumor cancers selected from the group consisting of head and neck cancers (e.g., HNSCC, nasopharyngeal, salivary gland), brain cancer (e.g., glioblastoma, glioma, gliosarcoma, glioblastoma multiforme, neuroblastoma), breast cancer (e.g., TNBC, trastuzumab resistant HER2+ breast cancer, ER+/HER− breast cancer), gynecological (e.g., uterine, ovarian cancer, cervical cancer, endometrial cancer, fallopian cancer), colorectal cancer, gallbladder cancer, esophageal cancer, gastrointestinal cancer, gastric cancer, bladder cancer, prostate cancer, testicular cancer, urothelial cancer, liver cancer (e.g., hepatocellular, HCC), lung cancer (e.g., non-small cell lung, small cell lung), kidney (renal cell) cancer, pancreatic cancer (e.g., adenocarcinoma, ductal), thyroid cancer, bile duct cancer, pituitary tumor, wilms tumor, kaposi sarcoma, hairy cell carcinoma, osteosarcoma, thymus cancer, skin cancer, melanoma, heart cancer, oral and larynx cancer, neuroblastoma, mesothelioma, and other solid tumors (thymic, bone, soft tissue, oral SCC, myelofibrosis, synovial sarcoma). In one embodiment, the mutations can include substitutions, insertions, inversions, point mutations, deletions, mismatches and translocations. In some embodiments, the target sequences or amplified target sequences are directed to sequences having aberrant expression associated with one or more blood/hematologic cancers selected from the group consisting of multiple myeloma, diffuse large B cell lymphoma (DLBCL), lymphoma, Hodgkins lymphoma, non-Hodgkins lymphoma, follicular lymphoma, leukemia, acute myeloid leukemia (AML), chronic lymphocytic leukemia (CLL), myelodisplastic syndrome. In one embodiment, the aberrant expression associated with cancer are located in at least one of the genes provided in Table 1.

[0060] In some embodiments, one or more aberrant expression immune response sequences are located in at least one of the genes selected from CD63, CD69, CXCL1, KLRD1, HLA-DOB, CXCR5, IL12B, PTK7, CEACAM1, CXCL9, IL13, NT5E, VEGFA, ABCF1, CD38, JAML, S100A8, MYC, IRF1, CCL22, CXCR2, IFIT1, IFIT2, CD68, M6PR, SH2D1A, ISG20, GBP1, TBP, STAT6, ID3, CX3CL1, KLRB1, TNFSF4, CD52, IL10RA, HLA-DOA, IFNB1, CCR5, IKZF3, STAT1, CD6, BRCA1, CORO1A, TBX21, KLRK1, CXCR6, PTEN, PMEL, DMBT1, IFI44L, LAPTM5, CD226, TNFSF13B, ICOS, CD160, TRIM29, LST1, ZBTB46, VTCN1, KREMEN1, PDCD1LG2, TUBB, CLEC4C, CD86, HAVCR2, GZMH, NFATC1, CD8B, BCL2, GADD45GIP1, CBLB, ITGA1, CD8A, IL2RA, EIF2AK2, MADCAM1, PTPN6, LRG1, ADGRE5, SH2D1B, ITGB2, HLA-DPA1, DGAT2, IGF1R, TAGAP, LMNA, NCAM1, TIGIT, IL17F, HLA-F-AS1, CD247, CD79B, IDO2, IL4, TYROBP, BTLA, AKT1, IL2RG, POLR2A, ITGAX, IL1B, CSF2RB, DDX58, KIAA0101, CD274, LAMP3, TNFAIP8, FOXP3, IL12A, SAMHD1, SIT1, CD3E, ICOSLG, HGF, MELK, IGSF6, GNLY, TDO2, KRT7, HLA-E, HLA-DM, LAMP1, NTN3, CD28, TARP, EGFR, CCR4, MAGEA3, BATF, KLRG1, IRS1, CSF1R, CTLA4, TNFSF18, POU2AF1, GZMA, PIK3CA, ITK, IFI27, EOMES, LCN2, CD80, CD83, CXCL13, MTOR, FCER1G, TFRC, RORC, MMP9, BST2, PIK3CD, FCGR2B, TNFRSF14, OAS3, GRAP2, CCNB2, MLANA, MAGEA12, VCAM1, CDKN3, NCR1, FAS, GZMB, IRF9, IFITM2, TNFSF14, HLA-B, SDHA, NRP1, EBI3, EFNA4, PVR, BUB1, SKAP2, PRF1, CCL20, TNFRSF18, CTSS, NKG7, ISG15, PDCD1, SNAI1, CXCL11, CIITA, IFI35, TNFSF9, TNFSF10, MMP2, EGR3, MAGEA1, CD163, IL6, KLRF1, B3GAT1, C1QA, OAS1, IKZF2, TLR9, KLF2, GUSB, NFKBIA, IL23A, HERC6, SLAMF8, IL15, TLR7, OAS2, HLA-DR, CRTAM, MAGEC2, ICAM1, CD4, MAPK14, C1QB, NOTCH3, NCR3, STAT3, TLR8, CYBB, IKZF4, IFIH1, LCK, BCL2L11, ITGAM, ITGB7, JCHAIN, CD209, SLAMF7, IL10, IL1A, FCGR3A, IFNA17, EGR2, TOP2A, C10orf54, FOXM1, AXL, MS4A1, IFI6, CD3D, GPR18, CD3G, ZAP70, HMBS, IL7, IFIT3, RB1, PTGS2, TGFB1, NCF1, TWIST1, CA4, SELL, LILRB1, CD14, ALOX15B, PECAM1, NOS2, FASLG, CD44, ENTPD1, CMKLR1, CD53, TNF, CXCL8, CD40LG, HLA-F, GATA3, LYZ, ARG1, IL2RB, NECTIN2, MPO, CCR2, BRCA2, ADORA2A, G6PD, TAP1, MX1, HLA-DQB2, CD27, CD276, STAT4, PTPN7, PTPRC, PSMB9, CD244, CXCR4, MAPK1, TP63, IRF4, CCL3, CCL18, IL7R, HLA-DRB1, CEACAM8, CXCL10, CCL2, SRGN, CD19, ITGB1, IFITM1, CCL21, MRC1, PGF, ITGAL, ID2, CD22, CCL17, ITGAE, IL3RA, CCR7, CD1C, MAD2L1, PYGL, CD40, LY9, HLA-G, TLR3, CD48, STAT5A, FCRLA, BCL6, ZEB1, CCL5, IDO1, IL18, TNFRSF9, HIF1A, HLA-DPB1, FOXO1, CD33, S100A9, HLA-DMB, HLA-A, SNAI2, TNFRSF17, LRP1, MAGEA4, HLA-DQA1, CD1D, RPS6, MKI67, GZMK, CD79A, CD37, FUT4, AIF1, CCR1, PRDM1, CD47, CD74, LAG3, TNFRSF4, CD2, CCL4, BAGE, LEXM, CCR6, CD70, CDK1, CTAG1B, CTAG2, CX3CR1, CX3CR1, CX3CR1, CX3CR1, GAGE1, GAGE12I, GAGE12F, GAGE12J, GAGE2C, GAGE2A, GAGE2E, GAGE10, GAGE13, IKZF1, IL17A, IL2, IL21, IL22, KIR2DL2, KIR2DL3, MAGEA10, MIF, PTPRCAP, SSX2, TCF7, XAGE1B, CEACAM8, CXCR3, FCGR1A, FCGR3B, FYB, HLA-C, HLA-DQA2, IFNG, KIR2DL1, KRT5, LMNA, and PTPN11. In some embodiments the one or more aberrant expression sequences indicate cancer activity.

[0061] In some embodiments the one or more aberrant expression sequences indicate a patient's likelihood to response to a therapeutic agent. In some embodiments, the one or more aberrant expression sequences indication a patient's likelihood to not be responsive to a therapeutic agent. In certain embodiments, relevant therapeutic agents can be immunotherapies including but not limited to checkpoint blockades, T cell therapies, and therapeutic vaccines. In some embodiments a therapeutic agent may modify an immune response gene selected from PD1 (e.g., nivolumab, pembrolizumab, AMP-244, MEDI0680, AMP-514, pidlizumab), CTLA4 (e.g., ipilimumab, tremelimumab), PD-L1 (e.g., atezolizumab, MDX1105-01, MEDI4736, avelumab), MR (e.g., lirilumab, NCC0141-0000-0100), CD9/NKG2A (e.g., IPH2201), LAG3 (e.g., BMS986016), GITR (e.g., TRX518), OX40 (e.g., MEDI6383, MEDI6489, MOXR0916), IDO (e.g., indoximod (NLG8189), INCB024360, F001287, NLG919), TGFbeta (e.g., sotaracept, fresolumimab, trabedersen, lucanix), TGFbetaR (e.g., LY2157299, ACE536), CD137 (e.g., urelumab), CD137/41BB (e.g., pf05082566), CD289/TLR9 (e.g., MGN1703), MUC1/CD227 (e.g., OINT-10, ASN-004), CD27 (e.g., varlilumab), CD27L (e.g., AMG172), SLAMF7/CD1 (e.g., elotuzumab), CD20 (e.g., DI-Leu16-IL2), talimogene laherparepvec, CD70 (e.g., ARGX110), IL10 (e.g., AM0010), PSA (e.g., PROSTVAC), GP100 (e.g., MDX1379), STAT3 (e.g., AZD9150), CVAC, IL12 (e.g., veledimex, INXN2001, MSB0010360N, IMMUNOPULSE, GEN-1, INO-9012; IL2: MSB0010445, RG7813/R06895882), IL33 (e.g., alarmin IL33), ICT140, CNDO-109, hTERT (e.g., INO-1400), dysplastic tissues (e.g., ADXS-HPV), SMAC-mimetic (e.g., birinapant), ImmTACs (e.g., IMCgp100), and CD40 (e.g., RO7009789. In certain embodiments, relevant therapeutic agent is an immunotherapy selected from checkpoint blockade, T cell therapy, and therapeutic vaccine. In some embodiments a therapeutic agent modifies an immune response gene selected from any of PD1 (e.g., nivolumab, pembrolizumab, AMP-244, MEDI0680, AMP-514, pidlizumab), CTLA4 (e.g., ipilimumab, tremelimumab), PD-L1 (e.g., atezolizumab, MDX1105-01, MEDI4736, avelumab), MR (e.g., lirilumab, NCC0141-0000-0100), CD9/NKG2A (e.g., IPH2201), LAG3 (e.g., BMS986016), GITR (e.g., TRX518), OX40 (e.g., MEDI6383, MEDI6489, MOXR0916), IDO (e.g., indoximod (NLG8189), INCB024360, F001287, NLG919), TGFbeta (e.g., sotaracept, fresolumimab, trabedersen, lucanix), TGFbetaR (e.g., LY2157299, ACE536), CD137 (e.g., urelumab), CD137/41BB (e.g., pf05082566), CD289/TLR9 (e.g., MGN1703), MUC1/CD227 (e.g., OINT-10, ASN-004), CD27 (e.g., varlilumab), CD27L (e.g., AMG172), SLAMF7/CD1 (e.g., elotuzumab), CD20 (e.g., DI-Leu16-IL2), talimogene laherparepvec, CD70 (e.g., ARGX110), IL10 (e.g., AM0010), PSA (e.g., PROSTVAC), GP100 (e.g., MDX1379), STAT3 (e.g., AZD9150), CVAC, IL12 (e.g., veledimex, INXN2001, MSB0010360N, IMMUNOPULSE, GEN-1, INO-9012; IL2: MSB0010445, RG7813/R06895882), IL33 (e.g., alarmin IL33), ICT140, CNDO-109, hTERT (e.g., INO-1400), dysplastic tissues (e.g., ADXS-HPV), SMAC-mimetic (e.g., birinapant), ImmTACs (e.g., IMCgp100), and CD40 (e.g., RO7009789.

[0062] In some embodiments, target sequences or amplified target sequences are directed to mutations associated with cancer. In some embodiments, the target sequences or amplified target sequences are directed to mutations associated with one or more solid tumor cancers selected from the group consisting of head and neck cancers (e.g., HNSCC, nasopharyngeal, salivary gland), brain cancer (e.g., glioblastoma, glioma, gliosarcoma, glioblastoma multiforme, neuroblastoma), breast cancer (e.g., TNBC, trastuzumab resistant HER2+ breast cancer, ER+/HER− breast cancer), gynecological (e.g., uterine, ovarian cancer, cervical cancer, endometrial cancer, fallopian cancer), colorectal cancer, gallbladder cancer, esophageal cancer, gastrointestinal cancer, gastric cancer, bladder cancer, prostate cancer, testicular cancer, urothelial cancer, liver cancer (e.g., hepatocellular, HCC), lung cancer (e.g., non-small cell lung, small cell lung), kidney (renal cell) cancer, pancreatic cancer (e.g., adenocarcinoma, ductal), thyroid cancer, bile duct cancer, pituitary tumor, wilms tumor, kaposi sarcoma, hairy cell carcinoma, osteosarcoma, thymus cancer, skin cancer, melanoma, heart cancer, oral and larynx cancer, neuroblastoma, mesothelioma, and other solid tumors (thymic, bone, soft tissue, oral SCC, myelofibrosis, synovial sarcoma). In one embodiment, the mutations can include substitutions, insertions, inversions, point mutations, deletions, mismatches and translocations. In one embodiment, the mutations can include variation in copy number. In one embodiment, the mutations can include germline or somatic mutations. In some embodiments, the target sequences or amplified target sequences are directed to sequences having mutations associated with one or more blood/hematologic cancers selected from the group consisting of multiple myeloma, diffuse large B cell lymphoma (DLBCL), lymphoma, Hodgkins lymphoma, non-Hodgkins lymphoma, follicular lymphoma, leukemia, acute myeloid leukemia (AML), chronic lymphocytic leukemia (CLL), myelodisplastic syndrome. In one embodiment, the mutations associated with cancer are located in at least one of the genes provided in Table 1.

[0063] In some embodiments, one or more mutations in immune response sequences associated with cancer are located in at least one of the genes selected from CD63, CD69, CXCL1, KLRD1, HLA-DOB, CXCR5, IL12B, PTK7, CEACAM1, CXCL9, IL13, NT5E, VEGFA, ABCF1, CD38, JAML, S100A8, MYC, IRF1, CCL22, CXCR2, IFIT1, IFIT2, CD68, M6PR, SH2D1A, ISG20, GBP1, TBP, STAT6, ID3, CX3CL1, KLRB1, TNFSF4, CD52, IL10RA, HLA-DOA, IFNB1, CCR5, IKZF3, STAT1, CD6, BRCA1, CORO1A, TBX21, KLRK1, CXCR6, PTEN, PMEL, DMBT1, IFI44L, LAPTM5, CD226, TNFSF13B, ICOS, CD160, TRIM29, LST1, ZBTB46, VTCN1, KREMEN1, PDCD1LG2, TUBB, CLEC4C, CD86, HAVCR2, GZMH, NFATC1, CD8B, BCL2, GADD45GIP1, CBLB, ITGA1, CD8A, IL2RA, EIF2AK2, MADCAM1, PTPN6, LRG1, ADGRE5, SH2D1B, ITGB2, HLA-DPA1, DGAT2, IGF1R, TAGAP, LMNA, NCAM1, TIGIT, IL17F, HLA-F-AS1, CD247, CD79B, IDO2, IL4, TYROBP, BTLA, AKT1, IL2RG, POLR2A, ITGAX, IL1B, CSF2RB, DDX58, KIAA0101, CD274, LAMP3, TNFAIP8, FOXP3, IL12A, SAMHD1, SIT1, CD3E, ICOSLG, HGF, MELK, IGSF6, GNLY, TDO2, KRT7, HLA-E, HLA-DM, LAMP1, NTN3, CD28, TARP, EGFR, CCR4, MAGEA3, BATF, KLRG1, IRS1, CSF1R, CTLA4, TNFSF18, POU2AF1, GZMA, PIK3CA, ITK, IFI27, EOMES, LCN2, CD80, CD83, CXCL13, MTOR, FCER1G, TFRC, RORC, MMP9, BST2, PIK3CD, FCGR2B, TNFRSF14, OAS3, GRAP2, CCNB2, MLANA, MAGEA12, VCAM1, CDKN3, NCR1, FAS, GZMB, IRF9, IFITM2, TNFSF14, HLA-B, SDHA, NRP1, EBI3, EFNA4, PVR, BUB1, SKAP2, PRF1, CCL20, TNFRSF18, CTSS, NKG7, ISG15, PDCD1, SNAI1, CXCL11, CIITA, IFI35, TNFSF9, TNFSF10, MMP2, EGR3, MAGEA1, CD163, IL6, KLRF1, B3GAT1, C1QA, OAS1, IKZF2, TLR9, KLF2, GUSB, NFKBIA, IL23A, HERC6, SLAMF8, IL15, TLR7, OAS2, HLA-DR, CRTAM, MAGEC2, ICAM1, CD4, MAPK14, C1QB, NOTCH3, NCR3, STAT3, TLR8, CYBB, IKZF4, IFIH1, LCK, BCL2L11, ITGAM, ITGB7, JCHAIN, CD209, SLAMF7, IL10, IL1A, FCGR3A, IFNA17, EGR2, TOP2A, C10orf54, FOXM1, AXL, MS4A1, IFI6, CD3D, GPR18, CD3G, ZAP70, HMBS, IL7, IFIT3, RB1, PTGS2, TGFB1, NCF1, TWIST1, CA4, SELL, LILRB1, CD14, ALOX15B, PECAM1, NOS2, FASLG, CD44, ENTPD1, CMKLR1, CD53, TNF, CXCL8, CD40LG, HLA-F, GATA3, LYZ, ARG1, IL2RB, NECTIN2, MPO, CCR2, BRCA2, ADORA2A, G6PD, TAP1, MX1, HLA-DQB2, CD27, CD276, STAT4, PTPN7, PTPRC, PSMB9, CD244, CXCR4, MAPK1, TP63, IRF4, CCL3, CCL18, IL7R, HLA-DRB1, CEACAM8, CXCL10, CCL2, SRGN, CD19, ITGB1, IFITM1, CCL21, MRC1, PGF, ITGAL, ID2, CD22, CCL17, ITGAE, IL3RA, CCR7, CD1C, MAD2L1, PYGL, CD40, LY9, HLA-G, TLR3, CD48, STAT5A, FCRLA, BCL6, ZEB1, CCL5, IDO1, IL18, TNFRSF9, HIF1A, HLA-DPB1, FOXO1, CD33, S100A9, HLA-DMB, HLA-A, SNAI2, TNFRSF17, LRP1, MAGEA4, HLA-DQA1, CD1D, RPS6, MKI67, GZMK, CD79A, CD37, FUT4, AIF1, CCR1, PRDM1, CD47, CD74, LAG3, TNFRSF4, CD2, CCL4, BAGE, LEXM, CCR6, CD70, CDK1, CTAG1B, CTAG2, CX3CR1, CX3CR1, CX3CR1, CX3CR1, GAGE1, GAGE12I, GAGE12F, GAGE12J, GAGE2C, GAGE2A, GAGE2E, GAGE10, GAGE13, IKZF1, IL17A, IL2, IL21, IL22, KIR2DL2, KIR2DL3, MAGEA10, MIF, PTPRCAP, SSX2, TCF7, XAGE1B, CEACAM8, CXCR3, FCGR1A, FCGR3B, FYB, HLA-C, HLA-DQA2, IFNG, KIR2DL1, KRT5, LMNA, and PTPN11

[0064] In some embodiments, amplified target sequences are directed to any one of more of the genes provided in Table 1. In some embodiments, amplified target sequences comprise any one or more amplicon sequences provided in Table 1. In some embodiments, amplified target sequences consist of any one or more amplicon sequences provided in Table 1. In some embodiments, amplified target sequences include each amplicon sequence provided in Table 1.

[0065] In some embodiments, compositions comprise any one or more of the immune response target-specific primer pairs provided in Table 2. In some embodiments, compositions comprise all of the immune response target-specific primer pairs provided in Table 2. In some embodiments, any one or more of the immune response target-specific primer pairs provided in Table 2 can be used to amplify a target sequence present in a sample as disclosed by the methods described herein.

[0066] In some embodiments, the immune response target-specific primers from Table 2 can include 2, 3, 4, 5, 6, 7, 8, 9, 10, 20, 40, 60, 80, 100, 150, 200, 250, 300, 350, 398 or more, target-specific primer pairs. In some embodiments, the amplified target sequences can include any one or more of the amplified target sequences provided in Table 1 (e.g., using amplicon ID target-specific primers provided in Table 2). In some embodiments, at least one of the target-specific primers associated with cancer is at least 90% identical to at least one nucleic acid sequence selected from SEQ ID NOs: 399-1194. In some embodiments, at least one of the target-specific primers associated with immune response is complementary across its entire length to at least one target sequence in a sample. In some embodiments, at least one of the target-specific primers associated with immune response includes a non-cleavable nucleotide at the 3′ end. In some embodiments, the non-cleavable nucleotide at the 3′ end includes the terminal 3′ nucleotide. In one embodiment, the amplified target sequences are directed to one or more individual exons having aberrant expression associated with cancer. In one embodiment, the amplified target sequences are directed to individual exons having a mutation associated with cancer. In some embodiments, provided methods comprise selective amplification of more than one target sequences in a sample and the detection and/or identification of mutations associated with cancer. In some embodiments, the amplified target sequences include two or more nucleotide sequences provided in Table 2. In some embodiments, the amplified target sequences can include any one or more the amplified target sequences generated using the target-specific primers provided in Table 2. In one embodiment, the amplified target sequences include 10, 50, 100, 150, 200, 250, 300, 350 or more amplicons from Table 1. In some embodiments, methods comprise detection and optionally, the identification of clinically actionable markers. As defined herein, the term “clinically actionable marker” includes clinically actionable mutations and/or clinically actionable expression patterns that are known or can be associated by one of ordinary skill in the art with, but not limited to, prognosis for the treatment of cancer. In one embodiment, prognosis for the treatment of cancer includes the identification of mutations and/or expression patterns associated with responsiveness or non-responsiveness of a cancer to a drug, drug combination, or treatment regime. In one embodiment, methods comprise amplification of a plurality of target sequences from a population of nucleic acid molecules linked to, or correlated with, the onset, progression or remission of cancer.

[0067] In some embodiments, housekeeping genes are comprised in the immune response assay. In certain embodiments, one or more housekeeping gene sequences are included in the assay. In particular embodiments the one or more housekeeping genes are selected from ABCF1, G6PD, GUSB, HMBS, LMNA, LRP1, POLR2A, SDHA, TBP, TFRC, and TUBB.

[0068] Provided herein are methods for determining immune response activity in a sample. In some embodiments, the method comprises multiplex amplification of a plurality of target expression sequences from a biological sample, wherein amplifying comprises contacting at least a portion of the sample with a plurality of sets of primer pair reagents directed to the plurality of target sequences, and a polymerase under amplification conditions, to thereby produce amplified target expression sequences. The method further comprises detecting the levels of expression of the target sequences in the sample, wherein a change in the level of expression of one or more immune response markers as compared with a control determines a change in immune response activity in the sample. In some embodiments the target expression sequences of the methods are selected from immune response genes consisting of the following function: checkpoint pathways, T cell related signaling pathways, markers of tumor infiltrating lymphocytes (TILS), tumor markers, and housekeeping genes. In some embodiments, the target genes are selected from immune response genes consisting of the following function: immune checkpoint pathways and targets; T and B cell signaling genes, markers of lymphocyte subsets, interferon signaling genes, cytokine signaling genes; tumor markers, tumor antigens, proliferation markers; and housekeeping genes. In some embodiments, the target genes of the methods are selected from immune response genes consisting of the following function: antigen presentation, antigen processing, innate immune response, leukocyte inhibition, leukocyte migration, lymphocyte activation, lymphocyte development, lymphocyte infiltrate, B cell receptor signaling, T cell receptor signaling, T cell regulation and TCR coexpression. In some embodiments, the target genes of the methods are selected from immune response genes consisting of the following function: chemokine signaling, cytokine signaling, interferon signaling, Type I interferon signaling, and Type II interferon signaling. In some embodiments, the target genes of the methods are selected from immune response genes consisting of the following function of markers: B cell marker, dendritic cell, dendritic cell/macrophage, helper T cell, macrophage, myeloid, neutrophil, NK activation, NK cell, and T cell differentiation. In some embodiments, the target genes of the methods are selected from immune response genes consisting of the following function of marker: checkpoint pathway, PD-signaling, and drug target. In some embodiments, the target genes of the methods are selected from immune response genes consisting of the following function of markers: adhesion/migration, apoptosis, proliferation, tumor antigen, and tumor marker.

[0069] In some embodiments, immune response target sequences of the methods are selected from immune response genes consisting of the following function: antigen presentation, antigen processing, innate immune response, leukocyte inhibition, leukocyte migration, lymphocyte activation, lymphocyte development, lymphocyte infiltrate, B cell receptor signaling, T cell receptor signaling, T cell regulation, TCR coexpression, chemokine signaling, cytokine signaling, interferon signaling, Type I interferon signaling, Type II interferon signaling, B cell marker, dendritic cell, dendritic cell/macrophage, helper T cell, macrophage, myeloid, neutrophil, NK activation, NK cell, T cell differentiation, checkpoint pathway, PD-signaling, drug target, adhesion/migration, apoptosis, proliferation, tumor antigen, and tumor marker.

[0070] In some embodiments, immune response target sequences of the methods are selected from immune response genes consisting of the following function: antigen presentation, antigen processing, innate immune response, leukocyte inhibition, leukocyte migration, lymphocyte activation, lymphocyte development, lymphocyte infiltrate, B cell receptor signaling, T cell receptor signaling, T cell regulation, TCR coexpression chemokine signaling, cytokine signaling, interferon signaling, Type I interferon signaling, Type II interferon signaling, B cell marker, dendritic cell, dendritic cell/macrophage, helper T cell, macrophage, myeloid, neutrophil, NK activation, NK cell, T cell differentiation, checkpoint pathway, PD-signaling, and drug target. In some embodiments, immune response target sequences of the methods are selected from immune response genes consisting of the following function: antigen presentation, antigen processing, innate immune response, leukocyte inhibition, leukocyte migration, lymphocyte activation, lymphocyte development, lymphocyte infiltrate, B cell receptor signaling, T cell receptor signaling, T cell regulation, TCR coexpression, chemokine signaling, cytokine signaling, interferon signaling, Type I interferon signaling, Type II interferon signaling, B cell marker, dendritic cell, dendritic cell/macrophage, helper T cell, macrophage, myeloid, neutrophil, NK activation, NK cell, T cell differentiation, adhesion/migration, apoptosis, proliferation, tumor antigen, and tumor marker. In some embodiments, immune response target sequences of the methods are selected from immune response genes consisting of the following function: antigen presentation, antigen processing, innate immune response, leukocyte inhibition, leukocyte migration, lymphocyte activation, lymphocyte development, lymphocyte infiltrate, B cell receptor signaling, T cell receptor signaling, T cell regulation, TCR coexpression, checkpoint pathway, PD-signaling, drug target, adhesion/migration, apoptosis, proliferation, tumor antigen, and tumor marker. In some embodiments, immune response target sequences of the methods are selected from immune response genes consisting of the following function: antigen presentation, antigen processing, innate immune response, leukocyte inhibition, leukocyte migration, lymphocyte activation, lymphocyte development, lymphocyte infiltrate, B cell receptor signaling, T cell receptor signaling, T cell regulation, TCR coexpression, chemokine signaling, cytokine signaling, interferon signaling, Type I interferon signaling, Type II interferon signaling, B cell marker, dendritic cell, dendritic cell/macrophage, helper T cell, macrophage, myeloid, neutrophil, NK activation, NK cell, T cell differentiation, checkpoint pathway, PD-signaling, drug target, adhesion/migration, apoptosis, proliferation, tumor antigen, and tumor marker. In some embodiments, immune response target sequences of the methods are selected from immune response genes consisting of the following function: chemokine signaling, cytokine signaling, interferon signaling, Type I interferon signaling, Type II interferon signaling, B cell marker, dendritic cell, dendritic cell/macrophage, helper T cell, macrophage, myeloid, neutrophil, NK activation, NK cell, T cell differentiation, checkpoint pathway, PD-signaling, drug target, adhesion/migration, apoptosis, proliferation, tumor antigen, and tumor marker.

[0071] In certain embodiments, target immune response sequences of the methods are directed to sequences having aberrant expression associated with cancer. In some embodiments, the target sequences or amplified target sequences of the methods are directed to sequences having aberrant expression associated with associated with one or more solid tumor cancers selected from the group consisting of head and neck cancers (e.g., HNSCC, nasopharyngeal, salivary gland), brain cancer (e.g., glioblastoma, glioma, gliosarcoma, glioblastoma multiforme, neuroblastoma), breast cancer (e.g., TNBC, trastuzumab resistant HER2+ breast cancer, ER+/HER− breast cancer), gynecological (e.g., uterine, ovarian cancer, cervical cancer, endometrial cancer, fallopian cancer), colorectal cancer, gallbladder cancer, esophageal cancer, gastrointestinal cancer, gastric cancer, bladder cancer, prostate cancer, testicular cancer, urothelial cancer, liver cancer (e.g., hepatocellular, HCC), lung cancer (e.g., non-small cell lung, small cell lung), kidney (renal cell) cancer, pancreatic cancer (e.g., adenocarcinoma, ductal), thyroid cancer, bile duct cancer, pituitary tumor, wilms tumor, kaposi sarcoma, hairy cell carcinoma, osteosarcoma, thymus cancer, skin cancer, melanoma, heart cancer, oral and larynx cancer, neuroblastoma, mesothelioma, and other solid tumors (thymic, bone, soft tissue, oral SCC, myelofibrosis, synovial sarcoma). In certain embodiments, the mutations can include any of substitutions, insertions, inversions, point mutations, deletions, mismatches and translocations. In some embodiments, the target sequences or amplified target sequences are directed to sequences having aberrant expression associated with one or more blood/hematologic cancers selected from the group consisting of multiple myeloma, diffuse large B cell lymphoma (DLBCL), lymphoma, Hodgkins lymphoma, non-Hodgkins lymphoma, follicular lymphoma, leukemia, acute myeloid leukemia (AML), chronic lymphocytic leukemia (CLL), myelodisplastic syndrome. In certain embodiments, aberrant expression associated with cancer involves in at least one of the genes provided in Table 1.

[0072] In some embodiments, one or more aberrant expression immune response sequences of the methods are at least one of the genes selected from CD63, CD69, CXCL1, KLRD1, HLA-DOB, CXCR5, IL12B, PTK7, CEACAM1, CXCL9, IL13, NT5E, VEGFA, ABCF1, CD38, JAML, S100A8, MYC, IRF1, CCL22, CXCR2, IFIT1, IFIT2, CD68, M6PR, SH2D1A, ISG20, GBP1, TBP, STAT6, ID3, CX3CL1, KLRB1, TNFSF4, CD52, IL10RA, HLA-DOA, IFNB1, CCR5, IKZF3, STAT1, CD6, BRCA1, CORO1A, TBX21, KLRK1, CXCR6, PTEN, PMEL, DMBT1, IFI44L, LAPTM5, CD226, TNFSF13B, ICOS, CD160, TRIM29, LST1, ZBTB46, VTCN1, KREMEN1, PDCD1LG2, TUBB, CLEC4C, CD86, HAVCR2, GZMH, NFATC1, CD8B, BCL2, GADD45GIP1, CBLB, ITGA1, CD8A, IL2RA, EIF2AK2, MADCAM1, PTPN6, LRG1, ADGRE5, SH2D1B, ITGB2, HLA-DPA1, DGAT2, IGF1R, TAGAP, LMNA, NCAM1, TIGIT, IL17F, HLA-F-AS1, CD247, CD79B, IDO2, IL4, TYROBP, BTLA, AKT1, IL2RG, POLR2A, ITGAX, IL1B, CSF2RB, DDX58, KIAA0101, CD274, LAMP3, TNFAIP8, FOXP3, IL12A, SAMHD1, SIT1, CD3E, ICOSLG, HGF, MELK, IGSF6, GNLY, TDO2, KRT7, HLA-E, HLA-DM, LAMP1, NTN3, CD28, TARP, EGFR, CCR4, MAGEA3, BATF, KLRG1, IRS1, CSF1R, CTLA4, TNFSF18, POU2AF1, GZMA, PIK3CA, ITK, IFI27, EOMES, LCN2, CD80, CD83, CXCL13, MTOR, FCER1G, TFRC, RORC, MMP9, BST2, PIK3CD, FCGR2B, TNFRSF14, OAS3, GRAP2, CCNB2, MLANA, MAGEA12, VCAM1, CDKN3, NCR1, FAS, GZMB, IRF9, IFITM2, TNFSF14, HLA-B, SDHA, NRP1, EBI3, EFNA4, PVR, BUB1, SKAP2, PRF1, CCL20, TNFRSF18, CTSS, NKG7, ISG15, PDCD1, SNAI1, CXCL11, CIITA, IFI35, TNFSF9, TNFSF10, MMP2, EGR3, MAGEA1, CD163, IL6, KLRF1, B3GAT1, C1QA, OAS1, IKZF2, TLR9, KLF2, GUSB, NFKBIA, IL23A, HERC6, SLAMF8, IL15, TLR7, OAS2, HLA-DR, CRTAM, MAGEC2, ICAM1, CD4, MAPK14, C1QB, NOTCH3, NCR3, STAT3, TLR8, CYBB, IKZF4, IFIH1, LCK, BCL2L11, ITGAM, ITGB7, JCHAIN, CD209, SLAMF7, IL10, IL1A, FCGR3A, IFNA17, EGR2, TOP2A, C10orf54, FOXM1, AXL, MS4A1, IFI6, CD3D, GPR18, CD3G, ZAP70, HMBS, IL7, IFIT3, RB1, PTGS2, TGFB1, NCF1, TWIST1, CA4, SELL, LILRB1, CD14, ALOX15B, PECAM1, NOS2, FASLG, CD44, ENTPD1, CMKLR1, CD53, TNF, CXCL8, CD40LG, HLA-F, GATA3, LYZ, ARG1, IL2RB, NECTIN2, MPO, CCR2, BRCA2, ADORA2A, G6PD, TAP1, MX1, HLA-DQB2, CD27, CD276, STAT4, PTPN7, PTPRC, PSMB9, CD244, CXCR4, MAPK1, TP63, IRF4, CCL3, CCL18, IL7R, HLA-DRB1, CEACAM8, CXCL10, CCL2, SRGN, CD19, ITGB1, IFITM1, CCL21, MRC1, PGF, ITGAL, ID2, CD22, CCL17, ITGAE, IL3RA, CCR7, CD1C, MAD2L1, PYGL, CD40, LY9, HLA-G, TLR3, CD48, STAT5A, FCRLA, BCL6, ZEB1, CCL5, IDO1, IL18, TNFRSF9, HIF1A, HLA-DPB1, FOXO1, CD33, S100A9, HLA-DMB, HLA-A, SNAI2, TNFRSF17, LRP1, MAGEA4, HLA-DQA1, CD1D, RPS6, MKI67, GZMK, CD79A, CD37, FUT4, AIF1, CCR1, PRDM1, CD47, CD74, LAG3, TNFRSF4, CD2, CCL4, BAGE, LEXM, CCR6, CD70, CDK1, CTAG1B, CTAG2, CX3CR1, CX3CR1, CX3CR1, CX3CR1, GAGE1, GAGE12I, GAGE12F, GAGE12J, GAGE2C, GAGE2A, GAGE2E, GAGE10, GAGE13, IKZF1, IL17A, IL2, IL21, IL22, KIR2DL2, KIR2DL3, MAGEA10, MIF, PTPRCAP, SSX2, TCF7, XAGE1B, CEACAM8, CXCR3, FCGR1A, FCGR3B, FYB, HLA-C, HLA-DQA2, IFNG, KIR2DL1, KRT5, LMNA, and PTPN11. In some embodiments the one or more aberrant expression sequences indicate cancer activity. In some embodiments the one or more aberrant expression sequences indicate a patient's likelihood to response to a therapeutic agent. In some embodiments, the one or more aberrant expression sequences indication a patient's likelihood to not be responsive to a therapeutic agent. In certain embodiments, relevant therapeutic agents can be immunotherapies including but not limited to checkpoint blockades, T cell therapies, and therapeutic vaccines. In some embodiments a therapeutic agent may modify an immune response gene selected from PD1 (e.g., nivolumab, pembrolizumab, AMP-244, MEDI0680, AMP-514, pidlizumab), CTLA4 (e.g., ipilimumab, tremelimumab), PD-L1 (e.g., atezolizumab, MDX1105-01, MEDI4736, avelumab), MR (e.g., lirilumab, NCC0141-0000-0100), CD9/NKG2A (e.g., IPH2201), LAG3 (e.g., BMS986016), GITR (e.g., TRX518), OX40 (e.g., MEDI6383, MEDI6489, MOXR0916), IDO (e.g., indoximod (NLG8189), INCB024360, F001287, NLG919), TGFbeta (e.g., sotaracept, fresolumimab, trabedersen, lucanix), TGFbetaR (e.g., LY2157299, ACE536), CD137 (e.g., urelumab), CD137/41BB (e.g., pf05082566), CD289/TLR9 (e.g., MGN1703), MUC1/CD227 (e.g., OINT-10, ASN-004), CD27 (e.g., varlilumab), CD27L (e.g., AMG172), SLAMF7/CD1 (e.g., elotuzumab), CD20 (e.g., DI-Leu16-IL2), talimogene laherparepvec, CD70 (e.g., ARGX110), IL10 (e.g., AM0010), PSA (e.g., PROSTVAC), GP100 (e.g., MDX1379), STAT3 (e.g., AZD9150), CVAC, IL12 (e.g., veledimex, INXN2001, MSB0010360N, IMMUNOPULSE, GEN-1, INO-9012; IL2: MSB0010445, RG7813/R06895882), IL33 (e.g., alarmin IL33), ICT140, CNDO-109, hTERT (e.g., INO-1400), dysplastic tissues (e.g., ADXS-HPV), SMAC-mimetic (e.g., birinapant), ImmTACs (e.g., IMCgp100), and CD40 (e.g., RO7009789. In certain embodiments, relevant therapeutic agent is an immunotherapy selected from checkpoint blockade, T cell therapy, and therapeutic vaccine. In some embodiments a therapeutic agent modifies an immune response gene selected from any of PD1 (e.g., nivolumab, pembrolizumab, AMP-244, MEDI0680, AMP-514, pidlizumab), CTLA4 (e.g., ipilimumab, tremelimumab), PD-L1 (e.g., atezolizumab, MDX1105-01, MEDI4736, avelumab), MR (e.g., lirilumab, NCC0141-0000-0100), CD9/NKG2A (e.g., IPH2201), LAG3 (e.g., BMS986016), GITR (e.g., TRX518), OX40 (e.g., MEDI6383, MEDI6489, MOXR0916), IDO (e.g., indoximod (NLG8189), INCB024360, F001287, NLG919), TGFbeta (e.g., sotaracept, fresolumimab, trabedersen, lucanix), TGFbetaR (e.g., LY2157299, ACE536), CD137 (e.g., urelumab), CD137/41BB (e.g., pf05082566), CD289/TLR9 (e.g., MGN1703), MUC1/CD227 (e.g., OINT-10, ASN-004), CD27 (e.g., varlilumab), CD27L (e.g., AMG172), SLAMF7/CD1 (e.g., elotuzumab), CD20 (e.g., DI-Leu16-IL2), talimogene laherparepvec, CD70 (e.g., ARGX110), IL10 (e.g., AM0010), PSA (e.g., PROSTVAC), GP100 (e.g., MDX1379), STAT3 (e.g., AZD9150), CVAC, IL12 (e.g., veledimex, INXN2001, MSB0010360N, IMMUNOPULSE, GEN-1, INO-9012; IL2: MSB0010445, RG7813/R06895882), IL33 (e.g., alarmin IL33), ICT140, CNDO-109, hTERT (e.g., INO-1400), dysplastic tissues (e.g., ADXS-HPV), SMAC-mimetic (e.g., birinapant), ImmTACs (e.g., IMCgp100), and CD40 (e.g., RO7009789.

[0073] In some embodiments, target sequences or amplified target sequences of the methods are directed to mutations associated with cancer. In some embodiments, the target sequences or amplified target sequences are directed to mutations associated with one or more solid tumor cancers selected from the group consisting of head and neck cancers (e.g., HNSCC, nasopharyngeal, salivary gland), brain cancer (e.g., glioblastoma, glioma, gliosarcoma, glioblastoma multiforme, neuroblastoma), breast cancer (e.g., TNBC, trastuzumab resistant HER2+ breast cancer, ER+/HER− breast cancer), gynecological (e.g., uterine, ovarian cancer, cervical cancer, endometrial cancer, fallopian cancer), colorectal cancer, gallbladder cancer, esophageal cancer, gastrointestinal cancer, gastric cancer, bladder cancer, prostate cancer, testicular cancer, urothelial cancer, liver cancer (e.g., hepatocellular, HCC), lung cancer (e.g., non-small cell lung, small cell lung), kidney (renal cell) cancer, pancreatic cancer (e.g., adenocarcinoma, ductal), thyroid cancer, bile duct cancer, pituitary tumor, wilms tumor, kaposi sarcoma, hairy cell carcinoma, osteosarcoma, thymus cancer, skin cancer, melanoma, heart cancer, oral and larynx cancer, neuroblastoma, mesothelioma, and other solid tumors (thymic, bone, soft tissue, oral SCC, myelofibrosis, synovial sarcoma). In one embodiment, the mutations can include substitutions, insertions, inversions, point mutations, deletions, mismatches and translocations. In one embodiment, the mutations can include variation in copy number. In one embodiment, mutations can include germline or somatic mutations. In some embodiments, the target sequences or amplified target sequences are directed to sequences having mutations associated with one or more blood/hematologic cancers selected from the group consisting of multiple myeloma, diffuse large B cell lymphoma (DLBCL), lymphoma, Hodgkins lymphoma, non-Hodgkins lymphoma, follicular lymphoma, leukemia, acute myeloid leukemia (AML), chronic lymphocytic leukemia (CLL), myelodisplastic syndrome. In one embodiment, mutations associated with cancer are located in at least one of the genes provided in Table 1.

[0074] In some embodiments, one or more mutations in immune response sequences associated with cancer are located in at least one of the genes selected from CD63, CD69, CXCL1, KLRD1, HLA-DOB, CXCR5, IL12B, PTK7, CEACAM1, CXCL9, IL13, NT5E, VEGFA, ABCF1, CD38, JAML, S100A8, MYC, IRF1, CCL22, CXCR2, IFIT1, IFIT2, CD68, M6PR, SH2D1A, ISG20, GBP1, TBP, STAT6, ID3, CX3CL1, KLRB1, TNFSF4, CD52, IL10RA, HLA-DOA, IFNB1, CCR5, IKZF3, STAT1, CD6, BRCA1, CORO1A, TBX21, KLRK1, CXCR6, PTEN, PMEL, DMBT1, IFI44L, LAPTM5, CD226, TNFSF13B, ICOS, CD160, TRIM29, LST1, ZBTB46, VTCN1, KREMEN1, PDCD1LG2, TUBB, CLEC4C, CD86, HAVCR2, GZMH, NFATC1, CD8B, BCL2, GADD45GIP1, CBLB, ITGA1, CD8A, IL2RA, EIF2AK2, MADCAM1, PTPN6, LRG1, ADGRE5, SH2D1B, ITGB2, HLA-DPA1, DGAT2, IGF1R, TAGAP, LMNA, NCAM1, TIGIT, IL17F, HLA-F-AS1, CD247, CD79B, IDO2, IL4, TYROBP, BTLA, AKT1, IL2RG, POLR2A, ITGAX, IL1B, CSF2RB, DDX58, KIAA0101, CD274, LAMP3, TNFAIP8, FOXP3, IL12A, SAMHD1, SIT1, CD3E, ICOSLG, HGF, MELK, IGSF6, GNLY, TDO2, KRT7, HLA-E, HLA-DM, LAMP1, NTN3, CD28, TARP, EGFR, CCR4, MAGEA3, BATF, KLRG1, IRS1, CSF1R, CTLA4, TNFSF18, POU2AF1, GZMA, PIK3CA, ITK, IFI27, EOMES, LCN2, CD80, CD83, CXCL13, MTOR, FCER1G, TFRC, RORC, MMP9, BST2, PIK3CD, FCGR2B, TNFRSF14, OAS3, GRAP2, CCNB2, MLANA, MAGEA12, VCAM1, CDKN3, NCR1, FAS, GZMB, IRF9, IFITM2, TNFSF14, HLA-B, SDHA, NRP1, EBI3, EFNA4, PVR, BUB1, SKAP2, PRF1, CCL20, TNFRSF18, CTSS, NKG7, ISG15, PDCD1, SNAI1, CXCL11, CIITA, IFI35, TNFSF9, TNFSF10, MMP2, EGR3, MAGEA1, CD163, IL6, KLRF1, B3GAT1, C1QA, OAS1, IKZF2, TLR9, KLF2, GUSB, NFKBIA, IL23A, HERC6, SLAMF8, IL15, TLR7, OAS2, HLA-DR, CRTAM, MAGEC2, ICAM1, CD4, MAPK14, C1QB, NOTCH3, NCR3, STAT3, TLR8, CYBB, IKZF4, IFIH1, LCK, BCL2L11, ITGAM, ITGB7, JCHAIN, CD209, SLAMF7, IL10, IL1A, FCGR3A, IFNA17, EGR2, TOP2A, C10orf54, FOXM1, AXL, MS4A1, IFI6, CD3D, GPR18, CD3G, ZAP70, HMBS, IL7, IFIT3, RB1, PTGS2, TGFB1, NCF1, TWIST1, CA4, SELL, LILRB1, CD14, ALOX15B, PECAM1, NOS2, FASLG, CD44, ENTPD1, CMKLR1, CD53, TNF, CXCL8, CD40LG, HLA-F, GATA3, LYZ, ARG1, IL2RB, NECTIN2, MPO, CCR2, BRCA2, ADORA2A, G6PD, TAP1, MX1, HLA-DQB2, CD27, CD276, STAT4, PTPN7, PTPRC, PSMB9, CD244, CXCR4, MAPK1, TP63, IRF4, CCL3, CCL18, IL7R, HLA-DRB1, CEACAM8, CXCL10, CCL2, SRGN, CD19, ITGB1, IFITM1, CCL21, MRC1, PGF, ITGAL, ID2, CD22, CCL17, ITGAE, IL3RA, CCR7, CD1C, MAD2L1, PYGL, CD40, LY9, HLA-G, TLR3, CD48, STAT5A, FCRLA, BCL6, ZEB1, CCL5, ID01, IL18, TNFRSF9, HIF1A, HLA-DPB1, FOXO1, CD33, S100A9, HLA-DMB, HLA-A, SNAI2, TNFRSF17, LRP1, MAGEA4, HLA-DQA1, CD1D, RPS6, MKI67, GZMK, CD79A, CD37, FUT4, AIF1, CCR1, PRDM1, CD47, CD74, LAG3, TNFRSF4, CD2, CCL4, BAGE, LEXM, CCR6, CD70, CDK1, CTAG1B, CTAG2, CX3CR1, CX3CR1, CX3CR1, CX3CR1, GAGE1, GAGE12I, GAGE12F, GAGE12J, GAGE2C, GAGE2A, GAGE2E, GAGE10, GAGE13, IKZF1, IL17A, IL2, IL21, IL22, KIR2DL2, KIR2DL3, MAGEA10, MIF, PTPRCAP, SSX2, TCF7, XAGE1B, CEACAM8, CXCR3, FCGR1A, FCGR3B, FYB, HLA-C, HLA-DQA2, IFNG, KIR2DL1, KRT5, LMNA, and PTPN11.

[0075] In one aspect, compositions and methods of the invention are used to identify biomarkers of response, sensitivity and/or non-response. In some embodiments, provided compositions and methods are used to compare absolute or relative gene expression changes between samples derived from a patients responding to treatment of immunotherapy and samples derived from non-responding patients. Any one or more gene(s) that demonstrate significantly different expression levels (e.g., high in responders group, low in non-responders group) is considered biomarker(s) predictive of drug response. In certain embodiments, such biomarkers of response are used for stratification of patients for immune response therapy. In some embodiments, provided compositions and methods are used to identify biomarkers of immune response monitoring after treatment. In certain embodiments, provided compositions and methods are used to compare absolute or relative gene expression changes correlating with immunohistochemistry readouts of an established clinical makers (e.g., PD-L1, NY-ESO-1, MAGE). In certain embodiments, provided compositions and methods are used to compare absolute or relative gene expression changes correlating with changes in any therapeutic target, pharmacodynamics markers, or immunogenic antigen. Any genes or combination of genes that show correlated up or down expression with these readouts could be considered as predictive markers of drug response. In some embodiments, provided compositions and methods are used to compare absolute or relative gene expression changes correlating with samples containing high level of tumor infiltrating lymphocytes (TIL) and samples containing low level of TIL, as reported by pathology review. Any genes or combination of genes significantly differ in expression between these two groups could be considered predictors of drug response. In some embodiments, provided compositions and methods are used to compare absolute or relative gene expression changes correlating with samples of different molecular subtypes (e.g., examples for colon-rectal cancer include but are not limited to microsatellite instability immune; hypermutated, microsatellite unstable and strong immune activation; epithelial and evident metabolic dysregulation; mesenchymal [http://www.nature.com/nm/journal/vaop/ncurrent/full/nm.3967.html]). Any genes or combination of genes significantly differ in expression between any of these groups could be considered predictors of drug response. In certain embodiments, provided compositions and methods are used to compare absolute or relative gene expression changes correlating with samples of different histopathology subtypes (e.g., examples for non-small cell lung include but are not limited to adenocarcinoma, squamous cell carcinoma, not-otherwise specified; examples for colon rectal). Any genes or combination of genes significantly differ in expression between these two groups could be considered predictors of drug response. In certain embodiments, provided compositions and methods are used to evaluate absolute or relative gene expression levels of different pathways and functions such as the T cell signaling pathway between samples derived from patients responding to treatment of immunotherapy and samples derived from non-responders. Any genes that show significantly different expression levels (high in one group, low in the other) could be considered potential biomarkers that are predictive of drug response.

[0076] In certain embodiments, provided compositions and methods are used to evaluate absolute or relative gene expression levels of different pathways and functions such as the T cell regulation pathway between samples derived from patients responding to treatment of immunotherapy and samples derived from non-responders. Any genes that show significantly different expression levels (high in one group, low in the other) could be considered potential biomarkers that are predictive of drug response. In certain embodiments, provided compositions and methods are used to evaluate absolute or relative gene expression levels of different pathways and functions such as antigen processing and/or antigen presentation between samples derived from patients responding to treatment of immunotherapy and samples derived from non-responders. Any genes that show significantly different expression levels (high in one group, low in the other) could be considered potential biomarkers that are predictive of drug response. In some embodiments, provided compositions and methods are used to evaluate absolute or relative gene expression levels of different pathways and functions such as the cytokine signaling pathway between samples derived from patients responding to treatment of immunotherapy and samples derived from non-responders. Any genes that show significantly different expression levels (high in one group, low in the other) could be considered potential biomarkers that are predictive of drug response. In some embodiments, provided compositions and methods are used to evaluate absolute or relative gene expression levels of different pathways and functions such as type I or type II interferon pathways between samples derived from patients responding to treatment of immunotherapy and samples derived from non-responders. Any genes that show significantly different expression levels (high in one group, low in the other) could be considered potential biomarkers that are predictive of drug response. In certain embodiments, provided compositions and methods are used to evaluate absolute or relative gene expression levels of different pathways and functions such as lymphocyte development and/or lymphocyte migration between samples derived from patients responding to treatment of immunotherapy and samples derived from non-responders. Any genes that show significantly different expression levels (high in one group, low in the other) could be considered potential biomarkers that are predictive of drug response. In certain embodiments, provided compositions and methods are used to evaluate absolute or relative gene expression levels of different pathways and functions such as the immune checkpoint pathway between samples derived from patients responding to treatment of immunotherapy and samples derived from non-responders. Any genes that show significantly different expression levels (high in one group, low in the other) could be considered potential biomarkers that are predictive of drug response. In certain embodiments, provided compositions and methods are used to evaluate the expression level of any genes contained on the panel or combination thereof (e.g., PD-1, PD-L1, CTLA4, etc.) between samples derived from patients responding to treatment of immunotherapy and samples derived from non-responders. Any genes that show significantly different expression levels (high in one group, low in the other) could be considered potential biomarkers of drug response. In certain embodiments, provided compositions and methods are used to evaluate the expression level of genes or isoforms of antigens (e.g., cancer testis antigens (GAGE), melanoma antigens (MAGE)) between samples derived from patients responding to treatment of immunotherapy and samples derived from non-responders. Any genes that show significantly different expression levels (high in one group, low in the other) could be considered potential biomarkers of drug response. In some embodiments, provided compositions and methods are used to evaluate different mathematical, quantitative or qualitative transformations of raw read count or normalized read count of any genes contained on the panel or combination thereof (for example, PD-1, PD-L1, CTLA4, etc.) between samples derived from patients responding to treatment of immunotherapy and samples derived from non-responders. Any genes that show significantly different expression levels (high in one group, low in the other) could be considered potential biomarkers of drug response. In certain embodiments, provided compositions and methods are used to profile the inflammatory level and abundance of different immune subsets (for example: cytotoxic T cells, helper T cells, macrophages, neutrophils, natural killer cells, myeloid derived suppressor cells) in the tumor micro-environment. Any differences in expression levels of these markers between samples derived responders and non-responders of treatment could be considered biomarkers predictive of response. In certain embodiments, provided compositions and methods are used to determine HLA type and its correlation with antigen presentation, T cell and B cell activation and drug response. In certain embodiments, provided compositions and methods are used to classify tumor samples as likely responder or non-responders to a therapeutic agent based on a classifier defined by another assay. In particular embodiments, provided compositions and methods are used to identify a subset of genes from which another panel can be derived to be used for purposes described herein. In a particular embodiment, additional primer sets could be added to the current panel to create an additional panel which can be used for purposes described herein.

[0077] In another aspect, provided compositions and methods are used to evaluate the expression levels of genes up or down regulated by immune checkpoint modulators. See, e.g., https://en.wikipedia.org/wiki/Immune_checkpoint. The identity of one or more gene(s) modulated by any specific therapeutic agent could be used to elucidate the mechanism of action of that agent. In some embodiments, provided compositions and methods are used to evaluate the expression levels of genes involved in the immune checkpoint pathway (including, e.g., PD-L1 signaling pathway). The identities of one or more genes modulated by any specific therapeutic agent could be used to elucidate the mechanism of action of that agent. In certain embodiments, provided compositions and methods are used to evaluate the expression levels of genes involved chemokine signaling, cytokine signaling, and/or interferon signaling. The identities of one or more genes modulated by any specific therapeutic agent can be used to elucidate the mechanism of action of that agent. In certain embodiments, provided compositions and methods are used to evaluate the expression levels of genes involved tumor cell adhesion, tumor cell migration, tumor cell proliferation or cancer stemness. The pattern of expression associating with each therapeutic agent could be used to infer the mechanism of action of that agent. In particular embodiments, provided compositions and methods are used to detect post-treatment changes in expression of any one or more genes in the panel. The high or low expression levels of such genes would be used to elucidate the mechanism of action of treated agent. In some embodiments, provided compositions and methods are used to detect post-treatment changes in expression of any intracellular or extracellular protein encoding genes contained on the panel. The high or low expression levels of such genes could be used to elucidate the mechanism of action of that agent. In some embodiments, provided compositions and methods are used to study the changed expression of intracellular protein-encoding genes in response to treatment of therapeutic agent or agents modulating extracellular proteins. High or low expression levels of such genes could be used to elucidate the mechanism of action of such agents. In still additional embodiments, provided compositions and methods are used to study the expression of any genes contained on the panel at different time points or treatment conditions. High or low expression levels of such genes could be used to elucidate the mechanism of action of that agent. In particular embodiments, provided compositions and methods are used to study the expression of any genes contained on the panel at different time points or treatment conditions with different therapeutic agents. The patterns of expression that are considered complementary could provide rationales to combine the corresponding agents for greater benefit. In particular embodiments, provided compositions and methods are used to study the expression of any genes contained on the panel at different time points or treatment conditions with different therapeutic agents. Patterns of expression that are considered complementary could provide rationales to combine the corresponding agents for reduced risk of adverse events. In certain embodiments, provided compositions and methods are used to study the expression of any genes modulated by any radiotherapy, chemotherapy, targeted therapy or immunotherapy. Complementary patterns of expression complementary could provide rationales to combine the corresponding agents for greater benefit or reduced risk of adverse events. In still other embodiments, provided compositions and methods are used to study expression of any genes modulated by a T cell therapy and immunosuppressive therapy. Complementary patterns of expression could provide rationales to combine the corresponding agents for greater benefit or reduced risk of adverse events.

[0078] In some embodiments, amplified target sequences of the methods are directed to any one of more of the genes provided in Table 1. In some embodiments, amplified target sequences of the methods comprise any one or more amplicon sequences provided in Table 1. In some embodiments, amplified target sequences of the methods consist of any one or more amplicon sequences provided in Table 1. In some embodiments, amplified target sequences of the methods include each amplicon sequence provided in Table 1.

[0079] In some embodiments, compositions used in provided methods comprise any one or more of the immune response target-specific primer pairs provided in Table 2. In some embodiments, compositions used in connection with provided methods comprise all of the immune response target-specific primer pairs provided in Table 2. In some embodiments, any one or more of the immune response target-specific primer pairs provided in Table 2 can be used to amplify a target sequence present in a sample as disclosed by the methods described herein.

[0080] In some embodiments, the methods utilize immune response target-specific primers from Table 2 and include 2, 3, 4, 5, 6, 7, 8, 9, 10, 20, 40, 60, 80, 100, 150, 200, 250, 300, 350, 398 or more, target-specific primer pairs. In some embodiments, methods include targeting amplified target sequences including one or more of the amplified target sequences generated in Table 1 (e.g., using amplicon target-specific primers provided in Table 2). In some embodiments, methods include use of at least one target-specific primer pair wherein each primer is at least 90% identical to at least one nucleic acid sequence selected from SEQ ID NOs: 399-1194. In some embodiments, methods include use of at least one of the target-specific primers associated with immune response is complementary across its entire length to at least one target sequence in a sample. In some embodiments, methods include use of at least one of the target-specific primers associated with immune response includes a non-cleavable nucleotide at the 3′ end. In some embodiments, methods include use of target specific primers wherein non-cleavable nucleotide at the 3′ end includes the terminal 3′ nucleotide. In one embodiment, methods include use of amplified target sequences directed to one or more individual exons having aberrant expression associated with cancer. In one embodiment, methods include use of amplified target sequences directed to individual exons having a mutation associated with cancer. In some embodiments, provided methods comprise selective amplification of more than one target sequences in a sample and the detection and/or identification of mutations associated with cancer. In some embodiments, methods include use of amplified target sequences including two or more nucleotide sequences provided in Table 2. In some embodiments, methods include use of amplified target sequences including any one or more the amplified target sequences generated using the target-specific primers provided in Table 2. In one embodiment, methods include use of amplified target sequences including 10, 50, 100, 150, 200, 250, 300, 350 or more amplicons from Table 1. In some embodiments, methods comprise detection and optionally, the identification of clinically actionable marker(s). As defined herein, the term “clinically actionable marker” includes clinically actionable mutations and/or clinically actionable expression patterns that are known or can be associated by one of ordinary skill in the art with, but not limited to, prognosis for the treatment of cancer. In one embodiment, prognosis for the treatment of cancer includes the identification of mutations and/or expression patterns associated with responsiveness or non-responsiveness of a cancer to a drug, drug combination, or treatment regime. In one embodiment, methods comprise amplification of a plurality of target sequences from a population of nucleic acid molecules linked to, or correlated with, the onset, progression or remission of cancer.

[0081] In some embodiments, provided compositions and methods are used to compare absolute or relative gene expression changes between samples derived from patients with good prognosis (defined by durable response, overall survival or 5-year survival) and those with poor prognosis. For example, gene(s) that show significantly different expression levels (e.g., high in one group, low in the other) could be considered potential prognostic biomarkers. In some embodiments, provided compositions and methods are used to compare absolute or relative gene expression changes correlating with samples containing high level of tumor infiltrating lymphocytes (TIL) and samples containing low level of TIL, as reported by pathology review. For example, gene(s) or combination of genes significantly differ in expression between these two groups could be considered potential prognostic biomarkers. In some embodiments, provided compositions and methods are used to compare absolute or relative gene expression changes correlating with samples of different histopathology subtypes molecular subtypes (examples for breast cancer include luminal A, luminal B, basal-like, HER2 positive). For example, gene(s) or combination of genes that significantly differ in expression between any of these groups could be considered potential prognostic biomarkers. In some embodiments, provided compositions and methods are used to compare absolute or relative gene expression changes correlating with samples of different histopathology subtypes (e.g., for breast cancer include, for example, ER+, PR+, HER2+, triple negative). For example, gene(s) or combination of genes that significantly differ in expression between these two groups could be considered prognostic biomarkers. In some embodiments, provided compositions and methods are used to evaluate absolute or relative gene expression levels of different pathways and functions such as the T cell signaling pathway between samples derived from patients responding to treatment of immunotherapy and samples derived from non-responders. For example, gene(s) that show significantly different expression levels (e.g., high in one group, low in another) could be considered potential prognostic biomarkers. In some embodiments, provided compositions and methods are used to evaluate gene expression levels of different pathways and functions such as the T cell regulation pathway between samples derived from patients responding to treatment of immunotherapy and samples derived from non-responders. For example, gene(s) that show significantly different expression levels (high in one group, low in the other) could be considered potential prognostic biomarkers. In some embodiments, provided compositions and methods are used to evaluate gene expression levels of different pathways and functions such as the expression of genes in antigen processing and/or antigen presentation between samples derived from patients responding to treatment of immunotherapy and samples derived from non-responders. For example, gene(s) that show significantly different expression levels (high in one group, low in the other) could be considered potential prognostic biomarkers. In some embodiments, provided compositions and methods are used to evaluate absolute or relative gene expression levels of different pathways and functions such as the expression of genes in cytokine signaling pathway between samples derived from patients responding to treatment of immunotherapy and samples derived from non-responders. For example, gene(s) that show significantly different expression levels (high in one group, low in the other) could be considered potential prognostic biomarkers. In some embodiments, provided compositions and methods are used to evaluate absolute or relative gene expression levels of different pathways and functions such as type I or type II interferon pathways between samples derived from patients responding to treatment of immunotherapy and samples derived from non-responders. For example, gene(s) that show significantly different expression levels (high in one group, low in the other) could be considered potential prognostic biomarkers. In some embodiments, provided compositions and methods are used to evaluate absolute or relative gene expression levels of different pathways and functions such as lymphocyte development and migration between samples derived from patients responding to treatment of immunotherapy and samples derived from non-responders. For example, gene(s) that show significantly different expression levels (high in one group, low in the other) could be considered potential prognostic biomarkers. In some embodiments, provided compositions and methods are used to evaluate absolute or relative gene expression levels of different pathways and functions such as the immune checkpoint pathway between samples derived from patients responding to treatment of immunotherapy and samples derived from non-responders. For example, gene(s) that show significantly different expression levels (high in one group, low in the other) could be considered potential prognostic biomarkers. In some embodiments, provided compositions and methods are used to evaluate the expression level of any genes contained on the panel or combination thereof (e.g., for example, PD-1, PD-L1, CTLA4, etc.) between samples derived from patients responding to treatment of immunotherapy and samples derived from non-responders. For example, gene(s) that show significantly different expression levels (high in one group, low in the other) could be considered potential prognostic biomarkers. In some embodiments, provided compositions and methods are used to evaluate different mathematical, quantitative or qualitative transformations of raw read count or normalized read count of any genes contained on the panel or combination thereof (e.g., for example, PD-1, PD-L1, CTLA4, etc.) between samples derived from patients responding to treatment of immunotherapy and samples derived from non-responders. For example, gene(s) that show significantly different expression levels (high in one group, low in the other) could be considered potential prognostic biomarkers. In some embodiments, provided compositions and methods are used to profile the inflammatory level and presence of different immune subsets (for example: cytotoxic T cells, helper T cells, macrophages, neutrophils, natural killer cells, myeloid derived suppressor cells) in the tumor micro-environment. Any differences in expression levels of these markers between samples derived responder and non-responder of treatment could be considered potential prognostic biomarkers.

[0082] In some embodiments, housekeeping genes are utilized in conjunction with provided methods in the immune response assay. In certain embodiments, one or more housekeeping gene sequences are included in the assay methods. In particular method embodiments the one or more housekeeping genes are selected from ABCF1, G6PD, GUSB, HMBS, LMNA, LRP1, POLR2A, SDHA, TBP, TFRC, and TUBB.

[0083] In some embodiments, the disclosure provides for amplification of multiple target-specific sequences from a population of expressed nucleic acid molecules. In some embodiments, the method comprises hybridizing one or more target-specific primer pairs to the target sequence, extending a first primer of the primer pair, denaturing the extended first primer product from the population of nucleic acid molecules, hybridizing to the extended first primer product the second primer of the primer pair, extending the second primer to form a double stranded product, and digesting the target-specific primer pair away from the double stranded product to generate a plurality of amplified target sequences. In some embodiments, the digesting includes partial digesting of one or more of the target-specific primers from the amplified target sequence. In some embodiments, the amplified target sequences can be ligated to one or more adapters. In some embodiments, adapters can include one or more DNA barcodes or tagging sequences. In some embodiments, amplified target sequences once ligated to an adapter can undergo a nick translation reaction and/or further amplification to generate a library of adapter-ligated amplified target sequences.

[0084] In some embodiments, provided methods comprise preparation and formation of multiple immune response target-specific amplicons. In some embodiments, the method comprises hybridizing one or more target-specific primer pairs to a nucleic acid molecule, extending a first primer of the primer, pair, denaturing the extended first primer from the nucleic acid molecule, hybridizing to the extended first primer product, a second primer of the primer pair and extending the second primer, digesting the target-specific primer pairs to generate a plurality of target-specific amplicons. In some embodiments, adapters can be ligated to the ends of the target-specific amplicons prior to performing a nick translation reaction to generate a plurality of target-specific amplicons suitable for nucleic acid sequencing. In some embodiments, the one or more target specific amplicons can be amplified using bridge amplification or emPCR to generate a plurality of clonal templates suitable for nucleic acid sequencing. In some embodiments, the disclosure provides methods for preparing a target-specific amplicon library, for use in a variety of downstream processes or assays such as nucleic acid sequencing or clonal amplification. In one embodiment, the disclosure provides a method of performing target-specific multiplex PCR on a nucleic acid sample having a plurality of expressed target sequences using primers having a cleavable group.

[0085] In certain embodiments, library and/or template preparation to be sequenced can be prepared automatically from a population of nucleic acid samples using the compositions provided herein using an automated systems, e.g., the Ion Chef™ system.

[0086] In one embodiment, nucleic acid templates to be sequenced using the Ion Torrent PGM 318™ or Ion Torrent S5 520™ or Ion Torrent S5 530™ system can be prepared from a population of nucleic acid molecules using the target-specific amplification techniques as outlined herein. Optionally, following target-specific amplification a secondary and/or tertiary amplification process including, but not limited to, a library amplification step and/or a clonal amplification step such as emPCR can be performed.

[0087] In some embodiments, provided are compositions comprising a plurality of target-specific primer pairs, each containing a forward primer and a reverse primer having at least one cleavable group located at either a) the 3′ end or the 5′ end, and/or b) at about the central nucleotide position of the target-specific primer, and wherein the target-specific primer pairs can be substantially non-complementary to other primer pairs in the composition. In some embodiments, the composition comprises at least 50, 100, 150, 200, 250, 300, 350, 398, or more target-specific primer pairs. In some embodiments, the target-specific primer pairs comprise about 15 nucleotides to about 40 nucleotides in length, wherein at least one nucleotide is replaced with a cleavable group. In some embodiments the cleavable group can be a uridine nucleotide. In some embodiments, the target-specific primer sets are designed to amplify an exon, gene, exome or region of the genome associated with a clinical or pathological condition, e.g., the amplification of one or more expressed sequences associated with cancer, wherein an increase and/or decrease in expression is associated with a change in immune response. In some embodiments, the target-specific primer sets are designed to amplify an exon, gene, exome or region of the genome associated with a change in immune response wherein an increase and/or decrease in expression is indicative of a cancer patient's likelihood to respond to one or more therapeutic agent(s). In some embodiments, the target-specific primer sets are designed to amplify an exon, gene, exome or region of the genome associated with a clinical or pathological condition, e.g., the amplification of one or more mutations associated with cancer. In some embodiments, the target-specific primer pairs when hybridized to a target sequence and amplified as outlined herein can generate a library of adapter-ligated amplified target sequences that are about 100 to about 500 base pairs in length. In some embodiments, no one adapter-ligated amplified target sequence is overexpressed in the library by more than 30% as compared to the remainder of the adapter-ligated amplified target sequences in the library. In some embodiments, the adapter-ligated amplified target sequence library is substantially homogenous with respect to GC content, amplified target sequence length or melting temperature (Tm).

[0088] In some embodiments, a kit is provided for performing multiplex PCR comprising a plurality of target-specific primers having a cleavable group, a DNA polymerase, an adapter, dATP, dCTP, dGTP and dTTP. In some embodiments, the cleavable group can be a uracil nucleotide. The kit can further include one or more antibodies, nucleic acid barcodes, purification solutions or columns.

[0089] In some embodiments, provided is a kit for generating a target-specific amplicon library comprising a plurality of target-specific primers having a cleavable group, a DNA polymerase, an adapter, dATP, dCTP, dGTP, dTTP, and a cleaving reagent. In some embodiments, the kit further comprises one or more antibodies, nucleic acid barcodes, purification solutions or columns.

[0090] In one embodiment, methods are provided for amplification of multiple target-specific sequences from a single nucleic acid source or sample. In another embodiment, methods are provided for target-specific amplification of two or more target sequences from two or more nucleic acid sources, samples or species. For example, it is envisioned by the disclosure that a single nucleic acid sample can include expressed RNA or fixed-formalin paraffin-embedded (FFPE) RNA. It is also envisioned that the sample can be from a single individual, a collection of nucleic acid samples from genetically related members, multiple nucleic acid samples from genetically unrelated members, multiple nucleic acid samples (matched) from a single individual such as a tumor sample and normal tissue sample, or genetic material from a single source that contains two distinct forms of genetic material such as maternal and fetal RNA obtained from a maternal subject, or the presence of contaminating bacteria RNA in a sample that contains plant or animal nucleic acid. In some embodiments, the source of nucleic acid material can include nucleic acids obtained from a newborn, for example as typically procured as a blood sample for newborn screening.

[0091] The nucleic acid sample can include high molecular weight material such as expressed RNA or cDNA. The sample can include low molecular weight material such as nucleic acid molecules obtained from FFPE or archived RNA samples. In another embodiment, low molecular weight material includes enzymatically or mechanically sheared nucleic acid sample. The sample can include cell-free circulating RNA such as material obtained from a maternal subject. In some embodiments, the sample can include nucleic acid molecules obtained from biopsies, tumors, scrapings, swabs, blood, mucus, urine, plasma, semen, hair, laser capture micro-dissections, surgical resections, and other clinical or laboratory obtained samples. In some embodiments, the sample can include nucleic acid molecules obtained from an animal such as a human or mammalian source. In another embodiment, the sample can include nucleic acid molecules obtained from a non-mammalian source such as a plant, bacteria, virus or fungus. In some embodiments, the source of the nucleic acid molecules may be an archived or extinct sample or species.

[0092] In some embodiments, provided methods comprise selective amplification of at least one target sequence in a normal or diseased containing tissue, biopsy, core, tumor, fine needle aspirate, fine needle biopsy, tumor microenvironment, blood, serum, or other sample. In some embodiments, provided methods comprise selective amplification of at least one target sequence and the detection and/or identification of mutations in the diseased tissue, biopsy, core, tumor, fine needle aspirate, fine needle biopsy, tumor microenvironment, blood, serum, or other sample. In some embodiments, the diseased or normal sample can include whole transcriptomic RNA, formalin-fixed paraffin-embedded tissue (FFPE), sheared or enzymatically treated RNA. In some embodiments, the disclosure is directed to the selective amplification of at least one target sequence and detection and/or identification of clinically actionable mutations or expression patterns. In some embodiments, the disclosure is directed to the detection and/or identification of mutations or expression associated with drug resistance or drug susceptibility.

[0093] In some embodiments, provided methods comprise selective amplification of at least one target sequence in cell-free circulating RNA. In some embodiments, the selective amplification of at least one target sequence in a sample includes a mixture of different nucleic acid molecules. The selective amplification can optionally be accompanied by detection and/or identification of mutations observed in circulating RNA. In some embodiments, selective amplification can optionally be accompanied by detection and/or identification of mutations associated with cancer or an inherited disease such as metabolic, neuromuscular, developmental, cardiovascular, autoimmune or other inherited disorder.

[0094] In some embodiments, the target-specific primers and primer pairs are target-specific sequences that can amplify specific regions of a nucleic acid molecule. In some embodiments, the target-specific primers can amplify expressed RNA or cDNA. In some embodiments, the target-specific primers can amplify mammalian RNA, such as human RNA or cDNA prepared therefrom. In some embodiments, the amount of RNA required for selective amplification can be from about 1 ng to 1 microgram. In some embodiments, the amount of RNA required for selective amplification of one or more target sequences can be about 1 ng, about 5 ng or about 10 ng. In some embodiments, the amount of RNA required for selective amplification of target sequence is about 10 ng to about ng.

[0095] In some embodiments, selective amplification of at least one target sequence further includes nucleic acid sequencing of the amplified target sequence. Optionally, the method further includes detecting and/or identifying mutations present in the sample identified through nucleic acid sequencing of the amplified target sequence.

[0096] In one embodiment, a sample containing one or more target sequences can be amplified using any one or more of the target-specific primers disclosed herein. In another embodiment, amplified target sequences obtained using the methods (and associated compositions, systems, apparatuses and kits) disclosed herein, can be coupled to a downstream process, such as but not limited to, nucleic acid sequencing. For example, once the nucleic acid sequence of an amplified target sequence is known, the nucleic acid sequence can be compared to one or more reference samples such as Hg19 genome. The Hg19 genome is commonly used in the genomics field as a reference genome sample for humans.

[0097] It is envisaged that one of ordinary skill in the art can readily prepare one or more target-specific primers using the primer criteria disclosed herein without undue experimentation. It is also envisaged that one of ordinary skill in the art can readily prepare one or more target-specific primers using the criteria disclosed herein, to identify at least one medically relevant polymorphism. In some instances, a medically relevant polymorphism can be used in forensic or human identification purposes. A medically relevant mutation includes a mutation that is associated with at least one disease state in multiple populations (e.g., a European Caucasian population). In some embodiments, a medically relevant polymorphism includes any one or more of the polymorphisms outlined below.

[0098] In some embodiments, provided are methods (and associated compositions, systems, apparatuses and kits) for reducing the formation of amplification artifacts in a multiplex PCR. In some embodiments, primer-dimers or non-specific amplification products are obtained in lower number or yield as compared to standard multiplex PCR of the prior art. In some embodiments, the reduction in amplification artifacts is in part, governed by the use of target-specific primer pairs in the multiplex PCR reaction. In one embodiment, the number of target-specific primer pairs in the multiplex PCR reaction can be greater than 50, 100, 150, 200, 250, 300 or more. In some embodiments, provided are methods (and associated compositions, systems, apparatuses and kits) for performing multiplex PCR using target-specific primers that contain a cleavable group. In one embodiment, target-specific primers containing a cleavable group can include one or more cleavable moieties per primer of each primer pair. In some embodiments, a target-specific primer containing a cleavable group includes a nucleotide neither normally present in a non-diseased sample nor native to the population of nucleic acids undergoing multiplex PCR. For example, a target-specific primer can include one or more non-native nucleic acid molecules such as, but not limited to thymine dimers, 8-oxo-2′-deoxyguanosine, inosine, deoxyuridine, bromodeoxyuridine, apurinic nucleotides, and the like.

[0099] In some embodiments, provided methods (and associated compositions, systems, etc.,) involve performing a primary amplification of target sequences from a population of nucleic acids, optionally using target-specific primers. In some embodiments, provided methods involve amplifying target sequences using target-specific forward and reverse primer pairs. The target-specific forward and reverse primer pairs can optionally include one or more intron-specific and/or exon specific forward and reverse primer pairs. In some embodiments, each primer pair is directed to a single or discrete exon. In some embodiments, provided methods involve amplifying target sequences using exon-specific forward and reverse primer pairs containing at least one cleavable group. In some embodiments, the target-specific forward and reverse primer pairs contain a uracil nucleotide as the one or more cleavable groups. In one embodiment, a target-specific primer pair can include a uracil nucleotide in each of the forward and reverse primers of each primer pair. In one embodiment, a target-specific forward or reverse primer contains one, two, three or more uracil nucleotides. In some embodiments, provided methods involve amplifying at least 10, 50, 100, 150, 200, 250, 300, 350, 398 or more, target sequences from a population of nucleic acids having a plurality of target sequences using target-specific forward and reverse primer pairs containing at least two uracil nucleotides.

[0100] In some embodiments, target-specific primers (including but not limited to intron-specific and exon-specific primers, which can be forward and/or reverse primers) can be designed de novo using algorithms that generate oligonucleotide sequences according to specified design criteria. For example, the primers may be selected according to any one or more of criteria specified herein. In some embodiments, one or more of the target-specific primers are selected or designed to satisfy any one or more of the following criteria: (1) inclusion of two or more modified nucleotides within the primer sequence, at least one of which is included near or at the termini of the primer and at least one of which is included at, or about the center nucleotide position of the primer sequence; (2) primer length of about 15 to about 40 bases in length; (3) Tₘ of from about 60° C. to about 70° C.; (4) low cross-reactivity with non-target sequences present in the target genome or sample of interest; (5) for each primer in a given reaction, the sequence of at least the first four nucleotides (going from 3′ to 5′ direction) are not complementary to any sequence within any other primer present in the same reaction; and (6) no amplicon includes any consecutive stretch of at least 5 nucleotides that is complementary to any sequence within any other amplicon.

[0101] In some embodiments, the target-specific primers include one or more primer pairs designed to amplify target sequences from the sample that are about 100 base pairs to about 500 base pairs in length. In some embodiments, the target-specific primers include a plurality of primer pairs designed to amplify target sequences, where the amplified target sequences are predicted to vary in length from each other by no more than 50%, typically no more than 25%, even more typically by no more than 10%, or 5%. For example, if one target-specific primer pair is selected or predicted to amplify a product that is 100 nucleotides in length, then other primer pairs are selected or predicted to amplify products that are between 50-150 nucleotides in length, typically between 75-125 nucleotides in length, even more typically between 90-110 nucleotides, or 95-105 nucleotides, or 99-nucleotides in length.

[0102] In some embodiments, at least one primer pair in the amplification reaction is not designed de novo according to any predetermined selection criteria. For example, at least one primer pair can be an oligonucleotide sequence selected or generated at random, or previously selected or generated for other applications. In one exemplary embodiment, the amplification reaction can include at least one primer pair selected from the TaqMan® probe reagents (Roche Molecular Systems). The TaqMan® reagents include labeled probes and can be useful, inter alia, for measuring the amount of target sequence present in the sample, optionally in real time. Some examples of TaqMan technology are disclosed in U.S. Pat. Nos. 5,210,015, 5,487,972, 5,804,375, 6,214,979, 7,141,377 and 7,445,900, hereby incorporated by reference in their entireties.

[0103] In some embodiments, at least one primer within the amplification reaction can be labeled, for example with an optically detectable label, to facilitate a particular application of interest. For example, labeling may facilitate quantification of target template and/or amplification product, isolation of the target template and/or amplification, product, and the like.

[0104] In some embodiments, one or more of the primers within the amplification reaction can be useful in genotyping of a nucleic acid sample.

[0105] In some embodiments, the target-specific primers can be provided as a set of target-specific primer pairs in a single amplification vessel. In some embodiments, the target-specific primers can be provided in one or more aliquots of target-specific primer pairs that can be pooled prior to performing the multiplex PCR reaction in a single amplification vessel or reaction chamber. In one embodiment, the target-specific primers can be provided as a pool of target-specific forward primers and a separate pool of target-specific reverse primers. In another embodiment, target-specific primer pairs can be pooled into subsets such as non-overlapping target-specific primer pairs. In some embodiments, the pool of target-specific primer pairs can be provided in a single reaction chamber or microwell, for example on a PCR plate to perform multiplex PCR using a thermocycler. In some embodiments, the target-specific forward and reverse primer pairs can be substantially complementary to the target sequences.

[0106] In some embodiments, the method of performing multiplex PCR amplification includes contacting a plurality of target-specific primer pairs having a forward and reverse primer, with a population of target sequences to form a plurality of template/primer duplexes; adding a DNA polymerase and a mixture of dNTPs to the plurality of template/primer duplexes for sufficient time and at sufficient temperature to extend either (or both) the forward or reverse primer in each target-specific primer pair via template-dependent synthesis thereby generating a plurality of extended primer product/template duplexes; denaturing the extended primer product/template duplexes; annealing to the extended primer product the complementary primer from the target-specific primer pair; and extending the annealed primer in the presence of a DNA polymerase and dNTPs to form a plurality of target-specific double-stranded nucleic acid molecules. In some embodiments, the steps of the amplification PCR method can be performed in any order. In some instances, the methods disclosed herein can be further optimized to remove one or more steps and still obtain sufficient amplified target sequences to be used in a variety of downstream processes. For example, the number of purification or clean-up steps can be modified to include more or less steps than disclose herein, providing the amplified target sequences are generated in sufficient yield.

[0107] In some embodiments, the target-specific primer pairs do not contain a common extension (tail) at the 3′ or 5′ end of the primer. In another embodiment, the target-specific primers do not contain a Tag or universal sequence. In some embodiments, the target-specific primer pairs are designed to eliminate or reduce interactions that promote the formation of non-specific amplification.

[0108] In one embodiment, the target-specific primer pairs comprise at least one cleavable group per forward and reverse target-specific primer. In one embodiment, the cleavable group can be a uracil nucleotide. In one embodiment, the target-specific primer pairs are partially or substantially removed after generation of the amplified target sequence. In one embodiment, the removal can include enzymatic, heat or alkali treatment of the target-specific primer pairs as part of the amplified target sequence. In some embodiments, the amplified target sequences are further treated to form blunt-ended amplification products, referred to herein as, blunt-ended amplified target sequences.

[0109] There is a need for new methods, computer readable media, and systems for identifying or designing products or kits that use PCR to enrich one or more genomic regions of interest (which may be, for example, cumulative regions of 1 kb to 1 Mb) for subsequent sequencing.

[0110] There is a need for new methods, computer readable media, and systems for identifying or designing products or kits including primers or assays that maximize coverage of one or more genomic regions or targets of interest while minimizing one or more of off-target hybridization, a number of primers, and a number of primer pools.

[0111] In accordance with the teachings and principles embodied in this application, new methods, computer readable media, and systems are provided that identify or design products or kits that use PCR to enrich one or more genomic regions or targets of interest for subsequent sequencing and/or that include primers or assays that maximize coverage of one or more genomic regions or targets of interest while minimizing one or more of off-target hybridization, a number of primers, and a number of primer pools.

[0112] According to an exemplary embodiment, there is provided a method comprising: (1) receiving or providing as inputs a genomic target region and a set of candidate amplicons for the genomic target region; (2) generating a graph comprising a source vertex, a set of amplicon vertices arranged in correspondence with the set of candidate amplicons, and a sink vertex; (3) determining a cost associated with one or more paths across the graph from the source vertex to the sink vertex via amplicon vertices; and (4) extracting the amplicon vertices from the one of the one or more paths across the graph having a least cost associated therewith.

[0113] In various embodiments, the one or more paths may comprise a sequence of amplicons wherein an ending portion of an insert of a first amplicon in the sequence of amplicons overlaps a beginning portion of an insert of a second amplicon in the sequence of amplicons. An ending portion of an insert of the second amplicon in the sequence of amplicons may overlap a beginning portion of an insert of a third amplicon in the sequence of amplicons. An ending portion of an insert of the third amplicon in the sequence of amplicons may overlap a beginning portion of an insert of a fourth amplicon in the sequence of amplicons.

[0114] In various embodiments, the one or more paths may comprise a sequence of N amplicons, N being a positive integer, wherein an ending portion of an insert of an amplicon amp in the sequence of amplicons overlaps a beginning portion of an insert of an amplicon amp+1 in the sequence of amplicons, wherein amp is an integer taking values 1, . . . , N−1. The one or more paths may comprise a sequence of L=N+M amplicons, N and M being positive integers, wherein an ending portion of an insert of an amplicon amp in the sequence of amplicons overlaps (which may include merely touching) a beginning portion of an insert of an amplicon amp+1 in the sequence of amplicons where amp is an integer taking values 1, . . . , N−1; wherein an ending portion of an insert of an amplicon amp in the sequence of amplicons overlaps (which may include merely touching) a beginning portion of an insert of an amplicon amp+1 in the sequence of amplicons where amp is an integer taking values N+1, . . . , N+M−1; and wherein there is a gap between an ending portion of an insert of amplicon amp=N and a beginning portion of an insert of amplicon amp=N+1.

[0115] In various embodiments, the cost associated with each of the one or more paths may be a sum of the cost of every edge of the path linking two amplicon vertices. The cost associated with every edge of the path linking two amplicon vertices may be a sum of a first term related to the cost of the edge's destination amplicon vertex and a second term related to the cost of an overlap between an insert of the edge's destination amplicon and an insert of the edge's origin amplicon. The first term and the second term may be weighed by a blending factor such that the first term is multiplied by the blending factor or a function thereof and the second term is multiplied by one minus the blending factor or a function thereof. The cost of an amplicon vertex may be a numerical value along a scale between a first value representing a lower level of one or more undesirable characteristics selected from a group comprising at least a level of off-target amplification and a level of primer-dimer propensity and a second value representing a higher level of the one or more undesirable characteristics. The cost of an overlap between an insert of the edge's destination amplicon and an insert of the edge's origin amplicon may be determined based on a redundancy introduced by overlapping inserts. The cost of an overlap between an insert of the edge's destination amplicon and an insert of the edge's origin amplicon may be a function of a quotient between a number of base pairs in an overlap between the insert of the edge's destination amplicon and the insert of the edge's origin amplicon and a number of base pairs in a union of the insert of the edge's destination amplicon and the insert of the edge's origin amplicon.

[0116] According to an exemplary embodiment, there is provided a non-transitory machine-readable storage medium comprising instructions which, when executed by a processor, cause the processor to perform a method comprising: (1) receiving or providing as inputs a genomic target region and a set of candidate amplicons for the genomic target region; (2) generating a graph comprising a source vertex, a set of amplicon vertices arranged in correspondence with the set of candidate amplicons, and a sink vertex; (3) determining a cost associated with one or more paths across the graph from the source vertex to the sink vertex via amplicon vertices; and (4) extracting the amplicon vertices from the one of the one or more paths across the graph having a least cost associated therewith. In some embodiments, such a method may be extended to a method for pooling amplicons across a plurality of pools by using as input the amplicons corresponding to the extracted vertices.

[0117] According to an exemplary embodiment, there is provided a system, comprising: (1) a machine-readable memory; and (2) a processor configured to execute machine-readable instructions, which, when executed by the processor, cause the system to perform steps including: (a) receiving or providing as inputs a genomic target region and a set of candidate amplicons for the genomic target region; (b) generating a graph comprising a source vertex, a set of amplicon vertices arranged in correspondence with the set of candidate amplicons, and a sink vertex; (c) determining a cost associated with one or more paths across the graph from the source vertex to the sink vertex via amplicon vertices; and (d) extracting the amplicon vertices from the one of the one or more paths across the graph having a least cost associated therewith. In some embodiments, such a system may be extended to a system for pooling amplicons across a plurality of pools by using as input the amplicons corresponding to the extracted vertices.

[0118] According to various exemplary embodiments, one or more features of any one or more of the above-discussed teachings and/or exemplary embodiments may be performed or implemented using appropriately configured and/or programmed hardware and/or software elements. Determining whether an embodiment is implemented using hardware and/or software elements may be based on any number of factors, such as desired computational rate, power levels, heat tolerances, processing cycle budget, input data rates, output data rates, memory resources, data bus speeds, etc., and other design or performance constraints.

[0119] Examples of hardware elements may include processors, microprocessors, input(s) and/or output(s) (I/O) device(s) (or peripherals) that are communicatively coupled via a local interface circuit, circuit elements (e.g., transistors, resistors, capacitors, inductors, and so forth), integrated circuits, application specific integrated circuits (ASIC), programmable logic devices (PLD), digital signal processors (DSP), field programmable gate array (FPGA), logic gates, registers, semiconductor device, chips, microchips, chip sets, and so forth. The local interface may include, for example, one or more buses or other wired or wireless connections, controllers, buffers (caches), drivers, repeaters and receivers, etc., to allow appropriate communications between hardware components. A processor is a hardware device for executing software, particularly software stored in memory. The processor can be any custom made or commercially available processor, a central processing unit (CPU), an auxiliary processor among several processors associated with the computer, a semiconductor based microprocessor (e.g., in the form of a microchip or chip set), a macroprocessor, or any device for executing software instructions. A processor can also represent a distributed processing architecture. The I/O devices can include input devices, for example, a keyboard, a mouse, a scanner, a microphone, a touch screen, an interface for various medical devices and/or laboratory instruments, a bar code reader, a stylus, a laser reader, a radio-frequency device reader, etc. Furthermore, the I/O devices also can include output devices, for example, a printer, a bar code printer, a display, etc. Finally, the I/O devices further can include devices that communicate as both inputs and outputs, for example, a modulator/demodulator (modem; for accessing another device, system, or network), a radio frequency (RF) or other transceiver, a telephonic interface, a bridge, a router, etc.

[0120] Examples of software may include software components, programs, applications, computer programs, application programs, system programs, machine programs, operating system software, middleware, firmware, software modules, routines, subroutines, functions, methods, procedures, software interfaces, application program interfaces (API), instruction sets, computing code, computer code, code segments, computer code segments, words, values, symbols, or any combination thereof. A software in memory may include one or more separate programs, which may include ordered listings of executable instructions for implementing logical functions. The software in memory may include a system for identifying data streams in accordance with the present teachings and any suitable custom made or commercially available operating system (O/S), which may control the execution of other computer programs such as the system, and provides scheduling, input-output control, file and data management, memory management, communication control, etc.

[0121] According to various exemplary embodiments, one or more features of any one or more of the above-discussed teachings and/or exemplary embodiments may be performed or implemented using appropriately configured and/or programmed non-transitory machine-readable medium or article that may store an instruction or a set of instructions that, if executed by a machine, may cause the machine to perform a method and/or operations in accordance with the exemplary embodiments. Such a machine may include, for example, any suitable processing platform, computing platform, computing device, processing device, computing system, processing system, computer, processor, scientific or laboratory instrument, etc., and may be implemented using any suitable combination of hardware and/or software. The machine-readable medium or article may include, for example, any suitable type of memory unit, memory device, memory article, memory medium, storage device, storage article, storage medium and/or storage unit, for example, memory, removable or non-removable media, erasable or non-erasable media, writeable or re-writeable media, digital or analog media, hard disk, floppy disk, read-only memory compact disc (CD-ROM), recordable compact disc (CD-R), rewriteable compact disc (CD-RW), optical disk, magnetic media, magneto-optical media, removable memory cards or disks, various types of Digital Versatile Disc (DVD), a tape, a cassette, etc., including any medium suitable for use in a computer. Memory can include any one or a combination of volatile memory elements (e.g., random access memory (RAM, such as DRAM, SRAM, SDRAM, etc.)) and nonvolatile memory elements (e.g., ROM, EPROM, EEROM, Flash memory, hard drive, tape, CDROM, etc.). Moreover, memory can incorporate electronic, magnetic, optical, and/or other types of storage media. Memory can have a distributed architecture where various components are situated remote from one another, but are still accessed by the processor. The instructions may include any suitable type of code, such as source code, compiled code, interpreted code, executable code, static code, dynamic code, encrypted code, etc., implemented using any suitable high-level, low-level, object-oriented, visual, compiled and/or interpreted programming language.

[0122] According to various exemplary embodiments, one or more features of any one or more of the above-discussed teachings and/or exemplary embodiments may be performed or implemented at least partly using a distributed, clustered, remote, or cloud computing resource.

[0123] According to various exemplary embodiments, one or more features of any one or more of the above-discussed teachings and/or exemplary embodiments may be performed or implemented using a source program, executable program (object code), script, or any other entity comprising a set of instructions to be performed. When a source program, the program can be translated via a compiler, assembler, interpreter, etc., which may or may not be included within the memory, so as to operate properly in connection with the O/S. The instructions may be written using (a) an object oriented programming language, which has classes of data and methods, or (b) a procedural programming language, which has routines, subroutines, and/or functions, which may include, for example, C, C++, Pascal, Basic, Fortran, Cobol, Perl, Java, and Ada.

[0124] According to various exemplary embodiments, one or more of the above-discussed exemplary embodiments may include transmitting, displaying, storing, printing or outputting to a user interface device, a computer readable storage medium, a local computer system or a remote computer system, information related to any information, signal, data, and/or intermediate or final results that may have been generated, accessed, or used by such exemplary embodiments. Such transmitted, displayed, stored, printed or outputted information can take the form of searchable and/or filterable lists of runs and reports, pictures, tables, charts, graphs, spreadsheets, correlations, sequences, and combinations thereof, for example.

[0125] Various additional exemplary embodiments may be derived by repeating, adding, or substituting any generically or specifically described features and/or components and/or substances and/or steps and/or operating conditions set forth in one or more of the above-described exemplary embodiments. Further, it should be understood that an order of steps or order for performing certain actions is immaterial so long as the objective of the steps or action remains achievable, unless specifically stated otherwise. Furthermore, two or more steps or actions can be conducted simultaneously so long as the objective of the steps or action remains achievable, unless specifically stated otherwise. Moreover, any one or more feature, component, aspect, step, or other characteristic mentioned in one of the above-discussed exemplary embodiments may be considered to be a potential optional feature, component, aspect, step, or other characteristic of any other of the above-discussed exemplary embodiments so long as the objective of such any other of the above-discussed exemplary embodiments remains achievable, unless specifically stated otherwise.

[0126] In some embodiments, the amplified target sequences generated by the methods disclosed herein represent at least 60%, 70%, 80%, 90%, or more, of one or more exons amplified from the plurality of target sequences. In one embodiment, amplified target sequences of the present invention are about 90 to about 140 base pairs in length, about 100 to about 200 base pairs in length, about 100 to about 300 base pairs in length, or about 100 to about 400 base pairs in length. In one embodiment, the amplified target sequence includes the length of the forward primer and the length of the complementary reverse primer for each primer pair. In another embodiment, the amplified target sequence length includes the length of the reverse primer and the length of the complementary forward primer. In some embodiments, the length of the amplified target sequence minus the forward and reverse primer lengths is about 40 base pairs to about 350 base pairs. In some embodiments, the length of the amplified target sequences generated in the multiplex PCR reaction is substantially the same. As defined herein, “substantially the same” with respect to length of amplified target sequences generated via the methods disclosed herein refers to no more than 30% deviation in nucleotide length across the total number of amplified target sequences. In one embodiment, the percent GC content of an amplicon is less than 85%, less than 75%, less than 65%, less than 60%, or less than 50%. In one embodiment, substantially all amplified target sequences within a reaction contain between 30% and less than 85% GC content. In one embodiment, where the nucleic acid molecules are obtained from an archived or FFPE RNA sample, the length of the amplified target sequence is typically about 100 to about 200 base pairs in length. In one embodiment, if the nucleic acid sample is derived or obtained from expressed RNA or cDNA, the length of the amplified target sequence can be about 100 to about 500 base pairs in length.

[0127] In some embodiments, the amplified target sequences of provided methods can be used in various downstream analysis or assays with, or without, further purification or manipulation. For example, the amplified target sequences can be clonally amplified by techniques known in the art, such a bridge amplification or emPCR to generate a template library that can be used in next generation sequencing. In some embodiments, the amplified target sequences of provided methods or the resulting template libraries can be used for single nucleotide polymorphism (SNP) analysis, genotyping or epigenetic analysis, copy number variation analysis, gene expression analysis, analysis of gene mutations including but not limited to detection, prognosis and/or diagnosis, detection and analysis of rare or low frequency allele mutations, nucleic acid sequencing including but not limited to de novo sequencing, targeted resequencing and synthetic assembly analysis. In one embodiment, amplified target sequences can be used to detect mutations at less than 5% allele frequency. In some embodiments, the methods disclosed herein can be used to detect mutations in a population of nucleic acids at less than 4%, 3%, 2% or at about 1% allele frequency. In another embodiment, amplified target sequences prepared as described herein can be sequenced to detect and/or identify germline or somatic mutations from a population of nucleic acid molecules.

[0128] In some embodiments, the forward and/or reverse target-specific primers in the target-specific primer pairs can be “complementary” or “substantially complementary” to the population of nucleic acid molecules. As termed herein “substantially complementary to the population of nucleic acid molecules” refers to percentage complementarity between the primer and the nucleic acid molecule to which the primer will hybridize. The term “substantially complementary” as used herein refers to at least 70% complementarity. Therefore, substantially complementary refers to a range of complementarity of at least 70% but less than 100% complementarity between the primer and the nucleic acid molecule. A complementary primer is one that possesses 100% complementarity to the nucleic acid molecule. In one embodiment, each target-specific primer pair is designed to minimize cross-hybridization to another primer (or primer pair) in the same multiple PCR reaction (i.e., reduce the prevalence of primer-dimers). In another embodiment, each target-specific primer pair is designed to minimize cross-hybridization to non-specific nucleic acid sequences in the population of nucleic acid molecules (i.e., minimize off-target hybridization). In one embodiment, each target-specific primer is designed to minimize self-complementarity, formation of hairpin structures or other secondary structures.

[0129] In some embodiments, the amplified target sequences are formed via polymerase chain reaction. Extension of target-specific primers can be accomplished using one or more DNA polymerases. In one embodiment, the polymerase can be any Family A DNA polymerase (also known as pol I family) or any Family B DNA polymerase. In some embodiments, the DNA polymerase can be a recombinant form capable of extending target-specific primers with superior accuracy and yield as compared to a non-recombinant DNA polymerase. For example, the polymerase can include a high-fidelity polymerase or thermostable polymerase. In some embodiments, conditions for extension of target-specific primers can include ‘Hot Start’ conditions, for example Hot Start polymerases, such as Amplitaq Gold® DNA polymerase (Applied Biosciences), Platinum® Taq DNA Polymerase High Fidelity (Invitrogen) or KOD Hot Start DNA polymerase (EMD Biosciences). A ‘Hot Start’ polymerase includes a thermostable polymerase and one or more antibodies that inhibit DNA polymerase and 3′-5′ exonuclease activities at ambient temperature. In some instances, ‘Hot Start’ conditions can include an aptamer.

[0130] In some embodiments, the polymerase can be an enzyme such as Taq polymerase (from Thermus aquaticus), Tfi polymerase (from Thermus filiformis), Bst polymerase (from Bacillus stearothermophilus), Pfu polymerase (from Pyrococcus furiosus), Tth polymerase (from Thermus thermophilus), Pow polymerase (from Pyrococcus woesei), Tli polymerase (from Thermococcus litoralis), Ultima polymerase (from Thermotoga maritima), KOD polymerase (from Thermococcus kodakaraensis), Pol I and II polymerases (from Pyrococcus abyssi) and Pab (from Pyrococcus abyssi). In some embodiments, the DNA polymerase can include at least one polymerase such as Amplitaq Gold® DNA polymerase (Applied Biosciences), Stoffel fragment of Amplitaq® DNA Polymerase (Roche), KOD polymerase (EMD Biosciences), KOD Hot Start polymerase (EMD Biosciences), Deep Vent™ DNA polymerase (New England Biolabs), Phusion polymerase (New England Biolabs), Klentaql polymerase (DNA Polymerase Technology, Inc), Klentaq Long Accuracy polymerase (DNA Polymerase Technology, Inc), Omni KlenTaq™ DNA polymerase (DNA Polymerase Technology, Inc), Omni KlenTaq™ LA DNA polymerase (DNA Polymerase Technology, Inc), Platinum® Taq DNA Polymerase (Invitrogen), Hemo Klentaq™ (New England Biolabs), Platinum® Taq DNA Polymerase High Fidelity (Invitrogen), Platinum® Pfx (Invitrogen), Accuprime™ Pfx (Invitrogen), or Accuprime™ Taq DNA Polymerase High Fidelity (Invitrogen).

[0131] In some embodiments, the DNA polymerase can be a thermostable DNA polymerase. In some embodiments, the mixture of dNTPs can be applied concurrently, or sequentially, in a random or defined order. In some embodiments, the amount of DNA polymerase present in the multiplex reaction is significantly higher than the amount of DNA polymerase used in a corresponding single plex PCR reaction. As defined herein, the term “significantly higher” refers to an at least 3-fold greater concentration of DNA polymerase present in the multiplex PCR reaction as compared to a corresponding single plex PCR reaction.

[0132] In some embodiments, the amplification reaction does not include a circularization of amplification product, for example as disclosed by rolling circle amplification.

[0133] In some embodiments, the methods of the disclosure include selectively amplifying target sequences in a sample containing a plurality of nucleic acid molecules and ligating the amplified target sequences to at least one adapter and/or barcode. Adapters and barcodes for use in molecular biology library preparation techniques are well known to those of skill in the art. The definitions of adapters and barcodes as used herein are consistent with the terms used in the art. For example, the use of barcodes allows for the detection and analysis of multiple samples, sources, tissues or populations of nucleic acid molecules per multiplex reaction. A barcoded and amplified target sequence contains a unique nucleic acid sequence, typically a short 6-15 nucleotide sequence, that identifies and distinguishes one amplified nucleic acid molecule from another amplified nucleic acid molecule, even when both nucleic acid molecules minus the barcode contain the same nucleic acid sequence. The use of adapters allows for the amplification of each amplified nucleic acid molecule in a uniformed manner and helps reduce strand bias. Adapters can include universal adapters or propriety adapters both of which can be used downstream to perform one or more distinct functions. For example, amplified target sequences prepared by the methods disclosed herein can be ligated to an adapter that may be used downstream as a platform for clonal amplification. The adapter can function as a template strand for subsequent amplification using a second set of primers and therefore allows universal amplification of the adapter-ligated amplified target sequence. In some embodiments, selective amplification of target nucleic acids to generate a pool of amplicons can further comprise ligating one or more barcodes and/or adapters to an amplified target sequence. The ability to incorporate barcodes enhances sample throughput and allows for analysis of multiple samples or sources of material concurrently. In one example, amplified target nucleic acid molecules prepared by provided methods can be ligated to Ion Torrent™ Sequencing Adapters (A and P1 adapters, sold as a component of the Ion Fragment Library Kit, Life Technologies, Part No. 4466464) or Ion Torrent™ DNA Barcodes (Life Technologies, Part No. 4468654).

[0134] The methods disclosed herein are directed to the amplification of multiple target sequences via polymerase chain reaction (PCR). In some embodiments the multiplex PCR comprises hybridizing one or more target-specific primer pairs to a nucleic acid molecule, extending the primers of the target-specific primer pairs via template dependent synthesis in the presence of a DNA polymerase and dNTPs; repeating the hybridization and extension steps for sufficient time and sufficient temperature there generating a plurality of amplified target sequences. In some embodiments, the steps of the multiplex amplification reaction method can be performed in any order.

[0135] The amount of nucleic acid material required for successful multiplex amplification can be about 1 ng. In some embodiments, the amount of nucleic acid material can be about 10 ng to about 50 ng, about 10 ng to about 100 ng, or about 1 ng to about 200 ng of nucleic acid material. Higher amounts of input material can be used, however one aspect of the disclosure is to selectively amplify a plurality of target sequence from a low (ng) about of starting material.

[0136] The multiplex PCR amplification reactions disclosed herein can include a plurality of “cycles” typically performed on a thermocycler. Each cycle includes at least one annealing step and at least one extension step. In one embodiment, a multiplex PCR amplification reaction is performed wherein target-specific primer pairs are hybridized to a target sequence; the hybridized primers are extended generating an extended primer product/nucleic acid duplex; the extended primer product/nucleic acid duplex is denatured allowing the complementary primer to hybridize to the extended primer product, wherein the complementary primer is extended to generate a plurality of amplified target sequences. In one embodiment, the methods disclosed herein have about 5 to about cycles per preamplification reaction. The annealing temperature and/or annealing duration per cycle can be identical; can include incremental increases or decreases, or a combination of both. The extension temperature and/or extension duration per cycle can be identical; can include incremental increases or decreases, or a combination of both. For example, the annealing temperature or extension temperature can remain constant per cycle. In some embodiments, the annealing temperature can remain constant each cycle and the extension duration can incrementally increase per cycle. In some embodiments, increases or decreases in duration can occur in 15 second, 30 second, 1 minute, 2 minute or 4 minute increments. In some embodiments, increases or decrease in temperature can occur as 0.5, 1, 2, 3, or 4 Celsius deviations. In some embodiments, the amplification reaction can be conducted using hot-start PCR techniques. These techniques include the use of a heating step (>60° C.) before polymerization begins to reduce the formation of undesired PCR products. Other techniques such as the reversible inactivation or physical separation of one or more critical reagents of the reaction, for example the magnesium or DNA polymerase can be sequestered in a wax bead, which melts as the reaction is heated during the denaturation step, releasing the reagent only at higher temperatures. The DNA polymerase can also be kept in an active state by binding to an aptamer or an antibody. This binding is disrupted at higher temperatures, releasing the functional DNA polymerase that can proceed with the PCR unhindered.

[0137] In some embodiments, the disclosed methods can optionally include destroying one or more primer-containing amplification artifacts, e.g., primer-dimers, dimer-dimers or superamplicons. In some embodiments, the destroying can optionally include treating the primer and/or amplification product so as to cleave specific cleavable groups present in the primer and/or amplification product. In some embodiments, the treating can include partial or complete digestion of one or more target-specific primers. In one embodiment, the treating can include removing at least 40% of the target specific primer from the amplification product. The cleavable treatment can include enzymatic, acid, alkali, thermal, photo or chemical activity. The cleavable treatment can result in the cleavage or other destruction of the linkages between one or more nucleotides of the primer, or between one or more nucleotides of the amplification product. The primer and/or the amplification product can optionally include one or more modified nucleotides or nucleobases. In some embodiments, the cleavage can selectively occur at these sites, or adjacent to the modified nucleotides or nucleobases. In some embodiments, the cleavage or treatment of the amplified target sequence can result in the formation of a phosphorylated amplified target sequence. In some embodiments, the amplified target sequence is phosphorylated at the 5′ terminus.

[0138] In some embodiments, the template, primer and/or amplification product includes nucleotides or nucleobases that can be recognized by specific enzymes. In some embodiments, the nucleotides or nucleobases can be bound by specific enzymes. Optionally, the specific enzymes can also cleave the template, primer and/or amplification product at one or more sites. In some embodiments, such cleavage can occur at specific nucleotides within the template, primer and/or amplification product. For example, the template, primer and/or amplification product can include one or more nucleotides or nucleobases including uracil, which can be recognized and/or cleaved by enzymes such as uracil DNA glycosylase (UDG, also referred to as UNG) or formamidopyrimidine DNA glycosylase (Fpg). The template, primer and/or amplification product can include one or more nucleotides or nucleobases including RNA-specific bases, which can be recognized and/or cleaved by enzymes such as RNAseH. In some embodiments, the template, primer and/or amplification product can include one or more abasic sites, which can be recognized and/or cleaved using various proofreading polymerases or apyrase treatments. In some embodiments, the template, primer and/or amplification product can include 7,8-dihydro-8-oxoguanine (8-oxoG) nucleobases, which can be recognized or cleaved by enzymes such as Fpg. In some embodiments, one or more amplified target sequences can be partially digested by a FuPa reagent.

[0139] In some embodiments, the primer and/or amplification product includes one or more modified nucleotides including bases that bind, e.g., base pair, with other nucleotides, for example nucleotides in a complementary nucleic acid strand, via chemical linkages. In some embodiments, the chemical linkages are subject to specific chemical attack that selectively cleaves the modified nucleotides (or selectively cleaves one or more covalent linkages between the modified nucleotides and adjacent nucleotides within the primer and/or amplification product) but leaves the other nucleotides unaffected. For example, in some embodiments modified nucleotides can form disulfite linkages with other nucleotides in a complementary strand. Such disulfite linkages can be oxidized via suitable treatments. Similarly, certain modified nucleotides can base pair with other nucleotides in a complementary nucleic acid strand through linkages that can be selectively disrupted via alkali treatment. In some embodiments, the primer and/or amplification product includes one or more modified nucleotides that bind, e.g., base pair, with other nucleotides in a complementary nucleic acid strand through linkages exhibiting decreased thermal stability relative to typical base pairing linkages formed between natural bases. Such reduced-thermal stability linkages can be selectively disrupted through exposure of the primer and/or amplification product to elevated temperatures following amplification.

[0140] In an exemplary embodiment amplification primers are bisulfite in design, with either a 5′ universal forward amplification sequence linked to a 3′ target-specific forward primer, or a 5′ universal reverse amplification sequence linked to a 3′ target-specific reverse primer. Both primers contain modified nucleotides.

[0141] In some embodiments, primers are synthesized that are complementary to, and can hybridize with, discrete segments of a nucleic acid template strand, including: a primer that can hybridize to the 5′ region of the template, which encompasses a sequence that is complementary to either the forward or reverse amplification primer. In some embodiments, the forward primers, reverse primers, or both, share no common nucleic acid sequence, such that they hybridize to distinct nucleic acid sequences. For example, target-specific forward and reverse primers can be prepared that do not compete with other primer pairs within the primer pool to amplify the same nucleic acid sequence. In this example, primer pairs that do not compete with other primer pairs in the primer pool assist in the reduction of non-specific or spurious amplification products. In some embodiments, the forward and reverse primers of each primer pair are unique, in that the nucleotide sequence for each primer is non-complementary and non-identical to the other primer in the primer pair. In some embodiments, the primer pair can differ by at least 10%, at least 20%, at least 30%, at least 40%, at least 50%, at least 60%, at least 70%, at least 75%, at least 80%, at least 85%, or at least 90% nucleotide identity. In some embodiments, the forward and reverse primers in each primer pair are non-complementary or non-identical to other primer pairs in the primer pool or multiplex reaction. For example, the primer pairs within a primer pool or multiplex reaction can differ by at least 5%, at least 10%, at least 20%, at least 30%, at least 40%, at least 50%, at least 60%, or at least 70% nucleotide identity to other primer pairs within the primer pool or multiplex reaction. Primers are designed to minimize the formation of primer-dimers, dimer-dimers or other non-specific amplification products. Typically, primers are optimized to reduce GC bias and low melting temperatures (Tₘ) during the amplification reaction. In some embodiments, the primers are designed to possess a Tₘ of about 55° C. to about 72° C. In some embodiments, the primers of a primer pool can possess a Tₘ of about 59° C. to about 70° C., 60° C. to about 68° C., or 60° C. to about 65° C. In some embodiments, the primer pool can possess a Tₘ that does not deviate by more than 5° C.

[0142] In some embodiments, the target-specific primers do not contain a carbon-spacer or terminal linker. In some embodiments, the target-specific primers or amplified target sequences do not contain an enzymatic, magnetic, optical or fluorescent label.

[0143] The template can include a 3′ region that contains the sequence for either the upstream or downstream regions surrounding a particular gene or region of interest, such that the region of interest is bracketed by a forward amplification/upstream gene-specific fusion, and a reverse amplification/downstream region of interest fusion primer. In some embodiments, an internal separator sequence can separate the template regions that can hybridize to the amplification and gene-specific primers, and this may act as a key or barcode for subsequent downstream applications such as sequencing, etc. In some embodiments, a barcode or key can be incorporated into each of the amplification products to assist with data analysis and for example, cataloging. In some embodiments, the barcodes can be Ion Torrent™ DNA barcodes (Life Technologies).

[0144] In some embodiments, the primer includes a sufficient number of modified nucleotides to allow functionally complete degradation of the primer by the cleavage treatment, but not so many as to interfere with the primer's specificity or functionality prior to such cleavage treatment, for example in the amplification reaction. In some embodiments, the primer includes at least one modified nucleotide, but no greater than 75% of nucleotides of the primer are modified.

[0145] In some embodiments, multiple different primers including at least one modified nucleotide can be used in a single amplification reaction. For example, multiplexed primers including modified nucleotides can be added to the amplification reaction mixture, where each primer (or set of primers) selectively hybridizes to, and promotes amplification of different target nucleic acid molecules within the nucleic acid population. In some embodiments, different primer combinations can be added to the amplification reaction at plexy of at least about about 12-plex, 24-plex, 48-plex, 74-plex, 96-plex, 120-plex, 144-plex, 168-plex, 192-plex, 216-plex, 240-plex, 264-plex, 288-plex, 312-plex, 336-plex, 360-plex, 384-plex, or 398-plex. In some embodiments, the modified primers contain at least one modified nucleotide near or at the termini of the primer. In some embodiments, the modified primers contain two or more modified nucleotides within the primer sequence. In an exemplary embodiment, the primer sequence contains a uracil near, or at, the termini of the primer sequence. For the purposes of this disclosure “near” or “at the termini” of the primer sequences refers up to 10 nucleotides from the termini of the primer sequence. In some embodiments, the primer sequence contains a uracil located at, or about, the center nucleotide position of the primer sequence. For the purposes of this disclosure “at, or about the center nucleotide position of the primer sequence” refers to the incorporation of a uracil moiety at the center nucleotide of the primer sequence or within eight nucleotides, in either a 3′ or 5′ direction flanking the center nucleotide. In one embodiment, the target-specific primer sequence can contain a modified nucleobase at or about the center nucleotide position and contain a modified nucleobase at the 3′ and/or 5′ terminus. In some embodiments, the length of the forward or reverse primer sequence can be about 15 to about 40 bases in length. In some embodiments, the Tₘ of the primer sequence used in the multiplex reaction can be about 55° C. to about 72° C. In some embodiments, the primer pairs are designed to amplify sequences from the target nucleic acid molecules or amplicons that are about 100 base pairs to about 500 base pairs in length.

[0146] In some embodiments, the amplification reactions are conducted in parallel within a single reaction phase (for example, within the same amplification reaction mixture within a single tube). In some instances, an amplification reaction can generate a mixture of products including both the intended amplicon product as well as unintended, unwanted, nonspecific amplification artifacts such as primer-dimers. Post amplification, the reactions are then treated with any suitable agent that will selectively cleave or otherwise selectively destroy the nucleotide linkages of the modified nucleotides within the excess unincorporated primers and the amplification artifacts without cleaving or destroying the specification amplification products. For example, the primers can include uracil-containing nucleobases that can be selectively cleaved using UNG/UDG (optionally with heat and/or alkali). In some embodiments, the primers can include uracil-containing nucleotides that can be selectively cleaved using UNG and Fpg. In some embodiments, the cleavage treatment includes exposure to oxidizing conditions for selective cleavage of dithiols, treatment with RNAseH for selective cleavage of modified nucleotides including RNA-specific moieties (e.g., ribose sugars, etc.), and the like. This cleavage treatment can effectively fragment the original amplification primers and non-specific amplification products into small nucleic acid fragments that include relatively few nucleotides each. Such fragments are typically incapable of promoting further amplification at elevated temperatures. Such fragments can also be removed relatively easily from the reaction pool through the various post-amplification cleanup procedures known in the art (e.g., spin columns, NaEtOH precipitation, etc).

[0147] In some embodiments, amplification products following cleavage or other selective destruction of the nucleotide linkages of the modified nucleotides are optionally treated to generate amplification products that possess a phosphate at the 5′ termini. In some embodiments, the phosphorylation treatment includes enzymatic manipulation to produce 5′ phosphorylated amplification products. In one embodiment, enzymes such as polymerases can be used to generate 5′ phosphorylated amplification products. For example, T4 polymerase can be used to prepare 5′ phosphorylated amplicon products. Klenow can be used in conjunction with one or more other enzymes to produce amplification products with a 5′ phosphate. In some embodiments, other enzymes known in the art can be used to prepare amplification products with a 5′ phosphate group. For example, incubation of uracil nucleotide containing amplification products with the enzyme UDG, Fpg and T4 polymerase can be used to generate amplification products with a phosphate at the 5′ termini. It will be apparent to one of skill in the art that other techniques, other than those specifically described herein, can be applied to generate phosphorylated amplicons. It is understood that such variations and modifications that are applied to practice the methods, systems, kits, compositions and apparatuses disclosed herein, without resorting to undue experimentation are considered within the scope of the disclosure.

[0148] In some embodiments, primers that are incorporated in the intended (specific) amplification products, these primers are similarly cleaved or destroyed, resulting in the formation of “sticky ends” (e.g., 5′ or 3′ overhangs) within the specific amplification products. Such “sticky ends” can be addressed in several ways. For example, if the specific amplification products are to be cloned, the overhang regions can be designed to complement overhangs introduced into the cloning vector, thereby enabling sticky ended ligations that are more rapid and efficient than blunt ended ligations. Alternatively, the overhangs may need to be repaired (as with several next-generation sequencing methods). Such repair can be accomplished either through secondary amplification reactions using only forward and reverse amplification primers (e.g., correspond to A and P1 primers) comprised of only natural bases. In this manner, subsequent rounds of amplification rebuild the double-stranded templates, with nascent copies of the amplicon possessing the complete sequence of the original strands prior to primer destruction. Alternatively, the sticky ends can be removed using some forms of fill-in and ligation processing, wherein the forward and reverse primers are annealed to the templates. A polymerase can then be employed to extend the primers, and then a ligase, optionally a thermostable ligase, can be utilized to connect the resulting nucleic acid strands. This could obviously be also accomplished through various other reaction pathways, such as cyclical extend-ligation, etc. In some embodiments, the ligation step can be performed using one or more DNA ligases.

[0149] In some embodiments, provided are methods for single-tube multiplex PCR. In some embodiments, the method for single-tube multiplex PCR can include target-specific or exon-specific primers. In some embodiments, the exon-specific or target-specific primers can include at least one uracil nucleotide. In some embodiments, single-tube multiplex PCR can include selective amplification of at least 10, 50, 100, 150, 200, 250, 300, 350, 398 or more target nucleic acid molecules using target-specific or exon-specific uracil based primers.

[0150] In some embodiments, provided are methods for generating a target-specific or exon-specific amplicon library. In some embodiments, the amplicon library generated using target-specific or exon-specific primers can be associated with aberrant expression in human cancers. In some embodiments, the amplicon library generated using target-specific or exon-specific primers can be associated with mutations of human cancers. In some embodiments, the amplicon library can be generated from expressed RNA or cDNA or formalin-fixed, paraffin-embedded (FFPE) tissue. In some embodiments, the amplicons of the amplicon library prepared using the methods disclosed herein can be about 100 to about 300 base pairs in length, about 100 to about 250 base pairs in length, about 120 to about 220 base pairs in length or about 135 to about 205 base pairs in length. In some embodiments, the amplicon library can be prepared using primer pairs that are targeted to cancer specific mutations. In some embodiments, the primer pairs can be used to generate amplicons that once sequenced by any sequencing platform, including semi-conductor sequencing technology can be used to detect genetic mutations such as inversion, deletions, point mutations and variations in copy number.

[0151] In some embodiments, the primer pairs used to produce an amplicon library can result in the amplification of target-specific nucleic acid molecules possessing one or more of the following metrics: greater than 97% target coverage at 20× if normalized to 100× average coverage depth; greater than 97% of bases with greater than 0.2× mean; greater than 90% base without strand bias; greater than 95% of all reads on target; greater than 99% of bases with greater than 0.01× mean; and greater than 99.5% per base accuracy.

[0152] In some embodiments, the amplicon library can be used to detect and/or identify known mutations or de novo mutations in a sample.

[0153] In some embodiments, the amplicon library prepared using target—specific primer pairs can be used in downstream enrichment applications such as emulsion PCR or bridge PCR. In some embodiments, the amplicon library can be used in an enrichment application and a sequencing application. For example, an amplicon library can be sequenced using any suitable DNA sequencing platform. In some embodiments, an amplicon library can be sequenced using an Ion Torrent PGM Sequencer (Life Technologies). In some embodiments, a PGM sequencer can be coupled to server that applies parameters or software to determine the sequence of the amplified target nucleic acid molecules. In some embodiments, the amplicon library can be prepared, enriched and sequenced in less than 24 hours. In some embodiments, the amplicon library can be prepared, enriched and sequenced in approximately 9 hours. In some embodiments, an amplicon library can be a paired library, that is, a library that contains amplicons from a tumor sample and amplicons from a non-diseased sample. Each pair can be aligned, to detect and/or identify mutations present in the target nucleic acid molecules.

[0154] In some embodiments, methods for generating an amplicon library can include:
[0155] amplifying RNA expression or cDNA targets using exon-specific or target-specific primers to generate amplicons; purifying the amplicons from the input RNA or cDNA and primers;

[0156] phosphorylating the amplicons; ligating adapters to the phosphorylated amplicons; purifying the ligated amplicons; nick-translating the amplified amplicons; and purifying the nick-translated amplicons to generate the amplicon library. In some embodiments, additional amplicon library manipulations can be conducted following the step of amplification of RNA expression targets to generate the amplicons. In some embodiments, any combination of additional reactions can be conducted in any order, and can include: purifying; phosphorylating; ligating adapters; nick-translating; amplification and/or sequencing. In some embodiments, any of these reactions can be omitted or can be repeated. It will be readily apparent to one of skill in the art that the method can repeat or omit any one or more of the above steps. It will also be apparent to one of skill in the art that the order and combination of steps may be modified to generate the required amplicon library, and is not therefore limited to the exemplary methods provided.

[0157] A phosphorylated amplicon can be joined to an adapter to conduct a nick translation reaction, subsequent downstream amplification (e.g., template preparation), or for attachment to particles (e.g., beads), or both. For example, an adapter that is joined to a phosphorylated amplicon can anneal to an oligonucleotide capture primer which is attached to a particle, and a primer extension reaction can be conducted to generate a complementary copy of the amplicon attached to the particle or surface, thereby attaching an amplicon to a surface or particle. Adapters can have one or more amplification primer hybridization sites, sequencing primer hybridization sites, barcode sequences, and combinations thereof. In some embodiments, amplicons prepared by the methods disclosed herein can be joined to one or more Ion Torrent™ compatible adapters to construct an amplicon library. Amplicons generated by such methods can be joined to one or more adapters for library construction to be compatible with a next generation sequencing platform. For example, the amplicons produced by the teachings of the present disclosure can be attached to adapters provided in the Ion Fragment Library Kit (Life Technologies, Catalog No. 4466464).

[0158] In some embodiments, amplification of expressed RNA targets or FFPE samples can be conducted using a 2× AmpliSeq Hi Fi Master Mix. In some embodiments, the AmpliSeq Hi Fi Master Mix can include glycerol, dNTPs, and a DNA polymerase, such as Platinum® Taq DNA polymerase High Fidelity. In some embodiments, the 2× AmpliSeq Hi Fi Master Mix can further include at least one of the following: a preservative, magnesium sulfate, tris-sulfate and/or ammonium sulfate.

[0159] In some embodiments, amplification of expressed RNA targets or FFPE samples can be conducted using a 5× Ion AmpliSeq Hi Fi Master Mix. In some embodiments, the 5× Ion AmpliSeq Hi Fi Master Mix can include glycerol, dNTPs, and a DNA polymerase such as Platinum® Taq DNA polymerase High Fidelity. In some embodiments, the 5× Ion AmpliSeq Hi Fi Master Mix can further include at least one of the following: a preservative, magnesium chloride, magnesium sulfate, tris-sulfate and/or ammonium sulfate.

[0160] In some embodiments, phosphorylation of the amplicons can be conducted using a FuPa reagent. In some embodiments, the FuPa reagent can include a DNA polymerase, a DNA ligase, at least one uracil cleaving or modifying enzyme, and/or a storage buffer. In some embodiments, the FuP reagent can further include at least one of the following: a preservative and/or a detergent.

[0161] In some embodiments, phosphorylation of the amplicons can be conducted using a FuPa reagent. In some embodiments, the FuPa reagent can include a DNA polymerase, at least one uracil cleaving or modifying enzyme, an antibody and/or a storage buffer. In some embodiments, the FuPa reagent can further include at least one of the following: a preservative and/or a detergent. In some embodiments, the antibody is provided to inhibit the DNA polymerase and 3′-5′ exonuclease activities at ambient temperature.

[0162] In some embodiments, the amplicon library produced by the teachings of the present disclosure are sufficient in yield to be used in a variety of downstream applications including the Ion Xpress™ Template Kit using an Ion Torrent™ PGM system (e.g., PCR-mediated addition of the nucleic acid fragment library onto Ion Sphere™ Particles)(Life Technologies, Part No. 4467389). For example, instructions to prepare a template library from the amplicon library can be found in the Ion Xpress Template Kit User Guide (Thermo Fisher Scientific). Instructions for loading the subsequent template library onto the Ion Torrent™ Chip for nucleic acid sequencing are described in the Ion Sequencing User Guide (Thermo Fisher Scientific). In some embodiments, the amplicon library produced by the teachings of the present disclosure can be used in paired end sequencing (e.g., paired-end sequencing on the Ion Torrent™ PGM system (Thermo Fisher Scientific).

[0163] It will be apparent to one of ordinary skill in the art that numerous other techniques, platforms or methods for clonal amplification such as wildfire PCR and bridge amplification can be used in conjunction with the amplified target sequences of the present disclosure. It is also envisaged that one of ordinary skill in art upon further refinement or optimization of the conditions provided herein can proceed directly to nucleic acid sequencing (for example using the Ion Torrent PGM™ or Proton™ sequencers, Life Technologies) without performing a clonal amplification step.

[0164] In some embodiments, at least one of the amplified targets sequences to be clonally amplified can be attached to a support or particle. The support can be comprised of any suitable material and have any suitable shape, including, for example, planar, spheroid or particulate. In some embodiments, the support is a scaffolded polymer particle as described in U.S. Published App. No. 20100304982, hereby incorporated by reference in its entirety.

[0165] In some embodiments, nucleic acid sequencing of the amplified target sequences produced by the teachings of this disclosure include de novo sequencing or targeted resequencing. In some embodiments, nucleic acid sequencing further includes comparing the nucleic acid sequencing results of the amplified target sequences against a reference nucleic acid sample. In some embodiments, the reference sample can be normal tissue or well documented tumor sample. In some embodiments, nucleic acid sequencing of the amplified target sequences further includes determining the presence or absence of a mutation within the nucleic acid sequence. In some embodiments, the method further includes correlating the presence of a mutation with drug susceptibly, prognosis of treatment and/or organ rejection. In some embodiments, nucleic acid sequencing includes the identification of genetic markers associated with cancer. In some embodiments, nucleic acid sequencing includes the identification of copy number variation in a sample under investigation.

[0166] In some embodiments, a kit is provided for amplifying multiple immune response target expression sequences from a population of nucleic acid molecules in a single reaction. In some embodiments, the kit includes a plurality of target-specific primer pairs containing one or more cleavable groups, one or more DNA polymerases, a mixture of dNTPs and at least one cleaving reagent. In one embodiment, the cleavable group can be 8-oxo-deoxyguanosine, deoxyuridine or bromodeoxyuridine. In some embodiments, the at least one cleaving reagent includes RNaseH, uracil DNA glycosylase, Fpg or alkali. In one embodiment, the cleaving reagent can be uracil DNA glycosylase. In some embodiments, the kit is provided to perform multiplex PCR in a single reaction chamber or vessel. In some embodiments, the kit includes at least one DNA polymerase, which can be a thermostable DNA polymerase. In some embodiments, the concentration of the one or more DNA polymerases is present in a 3-fold excess as compared to a single PCR reaction. In some embodiments, the final concentration of each target-specific primer pair is present at about 25 nM to about 50 nM. In one embodiment, the final concentration of each target-specific primer pair can be present at a concentration that is 50% lower than conventional single-plex PCR reactions. In some embodiments, the kit provides amplification of at least 100, 150, 200, 250, 300, 350, 398, or more, target immune response expression sequences from a population of nucleic acid molecules in a single reaction chamber. In particular embodiments, a provided kit of the invention is a test kit.

[0167] In some embodiments, the kit further comprises one or more adapters, barcodes, and/or antibodies.

[0168] A common concern in study of RNA expression analyses is determination of how gene expression changes between different samples. Current methodology for RNA sequencing typically requires an amplification step followed by sequence analysis of select amplified products (e.g., transcripts) to a fixed number of reads. In particular, with the provided methods of the invention, expression of each gene can be inferred by amplifying an amplicon that represents a transcript (e.g., an amplicon crosses a selected exon/exon junction). Due to the selected amplification, there is a dependency between the number of reads associated with a particular gene transcript and the number of reads produced by all other genes. Such interdependency means an apparent identical fold-change can be induced by two distinct biological processes: an increase in the ration of expression of a particular gene, or a decrease in the expression ration of all other genes measured. To accurately measure which of the two scenarios takes place, number of reads should be correctly normalized within each sample before cross comparison of samples takes place. Normalization has been studies for full transcriptome RNA sequencing analyses. Among such studies, log RPM (read counts per million) has been widely accepted to provide an interpretable measure of gene expression that robustly reflects the difference in expression between samples. The accuracy of this measure, however, depends on the underlying assumption that the majority of the genes measured are not differentially expressed. This assumption tends to hold true for transcriptomic studies, where more than 20,000 genes of the same tissues are typically profiled. However, such an assumption is unlikely to always hold for smaller gene panels, for panels comprising very low expression genes, or for panels that focus on similar biological processes, such as, for example, the methods and compositions provided herein. As a simple illustration, consider a targeted panel of 20 genes made up of 2 functional categories, one with 16 and the other with 4 genes, where each gene of a function is perfectly correlated to the others. In this example, the actual number of RNA molecules in sample 1 and sample 2 is known, and can sequence an exact of proportion of reads. When a standard RPM computation is applied to measure the expression of each gene and calculate the fold change using our estimated expression, there is 2-fold increase in the smaller category, the fold change estimate maintains a fairly accurate estimate of true fold change (FIG. 8, left panel). However, if the number of molecules in the larger category of 16 genes increases 2-fold, the estimated fold change based on RPM, suggests that instead of an increase of 16 genes, we have decrease in 4 genes (FIG. 8, middle panel). Thus, on a targeted panel with a small number of total genes and strong correlation structure of most genes, standard RPM normalization provides inaccurate fold change estimation. However, if we assume that a smaller category is a set of standard endogenous controls, e.g., housekeeping (HK) genes, and are comparable across samples, this set of genes as a reference point to accurately measure the expression the target functional set of genes. Using the latter strategy provides an accurate fold change result (FIG. 8, right panel). Knowing how correlated the genes are to each other provides some guidelines for whether or not standard expression measurements will be biased on small, targeted RNA-seq panels.

[0169] Thus, in conjunction with the compositions and methods of the invention, provided compositions include primer pairs and methods for determination of expression of a set of housekeeping genes for use of one or more as endogenous controls and an effective means for normalization of expression levels and determination of expression changes across samples.

[0170] The following description of various exemplary embodiments is exemplary and explanatory only and is not to be construed as limiting or restrictive in any way. Other embodiments, features, objects, and advantages of the present teachings will be apparent from the description and accompanying drawings, and from the claims.

[0171] Although the present description described in detail certain exemplary embodiments, other embodiments are also possible and within the scope of the present invention. Variations and modifications will be apparent to those skilled in the art from consideration of the specification and figures and practice of the teachings described in the specification and figures, and the claims.

### EXEMPLIFICATION

[0172] Materials and Methods

[0173] Provided immune response assay compositions include reagents directed to 395 immune response markers designed for library preparation technology of expressed target sequences. Generally, RNAs extracted from samples (e.g., tumor samples, e.g., fresh, frozen, FFPE, of various types, e.g., lung tumor, NSCLC) were reverse transcribed; libraries were generated, template prepared, e.g., using Ion Chef™ or Ion OneTouch™ 2 System, then prepared samples were sequenced using next generation sequencing technology, e.g., an Ion S5™, an Ion PGM™ System.

[0174] Total RNA was extracted from samples, 10 ng of total RNA was first reverse transcribed to and used as template to amplify targets (e.g., target expression sequences in Table 1) with the immune response assay comprising primer pairs in Table 2. Manual library prep was performed with the Ion AmpliSeg™ Library Kit 2.0 which was then templated with either the Ion OneTouch™ 2 System or Ion Chef™ instrument. Automated library prep and templating was performed with the Ion AmpliSeg™ Kit for Chef DL8 and Ion Chef™ Instrument. Sequencing was performed on either the Ion S5™ System or the Ion PGM™ System. Gene expression was quantified with the Ion Torrent Suite™ software.

[0175] HL-60 and human normal lung (AM7968) were purchased from ATCC and Ambion, respectively. De-identified melanoma and NSCLC FFPE samples were procured from Asterand and Research Dx respectively.

TABLE 1
genes and amplicon insert sequences of the immune response assay

| | | SEQ |
|---|---|---|
| Gene/ | | ID |
| Accession | Amplicon Sequence | NO: |
| CD63/NM_00178 | CCCGACTCCTGCTGCATTAATGTTACTGTGGGCTGTGGGATTAATTTCAACGA | 1 |
| 0 | GAAGGCGATCCATAAGGAGGGCTGTGTGGAGAAGATTGGGGGCTGGCTGAGGA | |
| | AA | |
| CD69/NM_00178 | GTTCCTGTCCTGTGTGCTGTAATGAATGTGGTCTTCATCACCATTTTAATCAT | 2 |
| 1 | AGCTCTCATTGCCTTATCAGTGGGCCAATACAATTGTCCAGGCCAATACACAT | |
| | TC | |
| CXCL1/NM_0015 | TAAGAAAATCATCGAAAAGATGCTGAACAGTGACAAATCCAACTGACCAGAAG | 3 |
| 11 | GGAGGAGGAAGCTCACTGGTGGCTGTTCCTGAAGGAGGCCCTGCCCTTA | |
| KLRD1/NM_0022 | CGGCATCTCTGTGCTTCTCAGAAATCCAGCCTGCTTCAGCTTCAAAACACAGA | 4 |
| 62 | TGAACTGGATTTTATGAGCTCCAGTCAACAATTTTACTGGATTGGACTCTC | |
| HLA- | CTCCAGAAGATTTTGTGATTCAGGCAAAGGCTGACTGTTACTTCACCAACGGG | 5 |
| DOB/NM_002120 | ACAGAAAAGGTGCAGTTTGTGGTCAGATTCATCTTTAACTTGGAGGAGTATGT | |
| | AC | |
| CXCR5/NM_0017 | GGTGACTCACAGCCGGCACAGCCATGAACTACCCGCTAACGCTGGAAATGGAC | 6 |
| 16 | CTCGAGAACCTGGAGGACCTGTTCTGGGAACTGGACAGATTGGACA | |
| IL12B/NM_0021 | CAAAGGAGGCGAGGTTCTAAGCCATTCGCTCCTGCTGCTTCACAAAAAGGAAG | 7 |
| 87 | ATGGAATTTGGTCCACTGATATTTTAAAGGACCAGAAAGAACCCAAAAATAAG | |
| | AC | |
| PTK7/NM_00282 | TTGCCTGACCCAGGCCACACCAAAACCTACAGTTGTCTGGTACAGAAACCAGA | 8 |
| 1 | TGCTCATCTCAGAGGACTCACGGTTCGAGGTCTTCAAGAATGGGACCTTGCGC | |
| | ATC | |
| CEACAM1/NM_00 | GTCACTGGCTGCAACAGGACCACAGTCAAGACGATCATAGTCACTGAGCTAAG | 9 |
| 1712 | TCCAGTAGTAGCAAAGCCCCAAATCAAAGCCAGCAAGACCACAGTCACAGGAG | |
| | AT | |
| CXCL9/NM_0024 | CCAAGGGACTATCCACCTACAATCCTTGAAAGACCTTAAACAATTTGCCCCAA | 10 |
| 16 | GCCCTTCCTGCGAGAAAATTGAAATCATTGCTACACTGAAGAATGGAG | |
| IL13/NM_00218 | CAACGTGTCAGGCTGCAGTGCCATCGAGAAGACCCAGAGGATGCTGAGCGGAT | 11 |
| 8 | TCTGCCCGCACAAGGTCTCAGCTGGGCAGTTTTCCAGCTTGCATGTCCGAGAC | |
| | ACCA | |
| NT5E/NM_00252 | TGAGGGGTGTGGACGTCGTGGTGGGAGGACACTCCAACACATTTCTTTACACA | 12 |
| 6 | GGCAATCCACCTTCCAAAGAGGTGCCTGCTGGGAAGTACCCATTCATAG | |
| VEGFA/NM_0011 | CAGATGTGACAAGCCGAGGCGGTGAGCCGGGCAGGAGGAAGGAGCCTCCCTCA | 13 |
| 71623 | GGGTTTCGGGAACCAGATCTCTCACCAGGAAAGACTGATACAGAACGATCGA | |
| ABCF1/NM_0010 | TGATGTGTTGCTGTGTGAGCAGGAGGTGGTAGCAGATGAGACACCAGCAGTCC | 14 |
| 25091 | AGGCTGTTCTTCGAGCTGACACCAAGCGATTGAAGCTGCTGGAAGAGGAGCGG | |
| | CGG | |
| CD38/NM_00177 | TCCAGCGGGACATGTTCACCCTGGAGGACACGCTGCTAGGCTACCTTGCTGAT | 15 |
| 5 | GACCTCACATGGTGTGGTGAATTCAACACTTCCAAAATAAACTATCAATCTTG | |
| | CCC | |
| JAML/NM_00109 | CTTTCAGTTGAGCTTGGGGACTGCAGCTGTGGGGAGATTTCAGTGCATTGCCT | 16 |
| 8526 | CCCCTGGGTGCTCTTCATCTTGGATTTGAAAGTTGAGAGCAGCATGTTTTGCC | |
| | CACT | |
| S100A8/NM_002 | GGGAATTTCCATGCCGTCTACAGGGATGACCTGAAGAAATTGCTAGAGACCGA | 17 |
| 964 | GTGTCCTCAGTATATCAGGAAAAAGGGTGCAGACGTCTGGTT | |
| MYC/NM_002467 | GCAGCTGCTTAGACGCTGGATTTTTTTCGGGTAGTGGAAAACCAGCAGCCTCC | 18 |
| | CGCGACGATGCCCCTCAACGTTAGCTTCACCAACAGGAACTATGACCTCGACT | |
| | ACG | |
| IRF1/NM_00219 | GGAGGTGGAGCAGGCCCTGACTCCAGCACTGTCGCCATGTGCTGTCAGCAGCA | 19 |
| 8 | CTCTCCCCGACTGGCACATCCCAGTGGAAGTTGTGCCGGACAGCACCAGTGAT | |
| | CTG | |
| CCL22/NM_0029 | GCTGTGGCGCTTCAAGCAACTGAGGCAGGCCCCTACGGCGCCAACATGGAAGA | 20 |
| 90 | CAGCGTCTGCTGCCGTGATTACGTCCGTTACCGTCTGCCCCTGCGCGTGGTGA | |
| CXCR2/NM_0015 | AGCCCAGCGACCCAGTCAGGATTTAAGTTTACCTCAAAAATGGAAGATTTTAA | 21 |
| 57 | CATGGAGAGTGACAGCTTTGAAGATTTCTGGAAAGGTGAAGATCTTAGTAATT | |
| | A | |
| IFIT1/NM_0015 | ACAGCAACCATGAGTACAAATGGTGATGATCATCAGGTCAAGGATAGTCTGGA | 22 |
| 48 | GCAATTGAGATGTCACTTTACATGGGAGTTATCCATTGATGACGATGA | |
| IFIT2/NM_0015 | GCAGCTGCCTGAACCGAGCCCTGCCGAACAGCTGAGAATTGCACTGCAACCAT | 23 |
| 47 | GAGTGAGAACAATAAGAATTCCTTGGAGAGCAGCCTACGGCAACTAA | |
| CD68/NM_00125 | TGGGTGAGGCGGTTCAGCCATGAGGCTGGCTGTGCTTTTCTCGGGGGCCCTGC | 24 |
| 1 | TGGGGCTACTGGCAGCCCAGGGGACAGGGAATGACTGTCCTCACAAAAAATCA | |
| | GC | |
| M6PR/NM_00235 | TCACTGGGGATTCTGAGCTTTGGCTACTCCAGTTTCCCACGACACGATGTTCC | 25 |
| 5 | CTTTCTACAGCTGCTGGAGGACTGGACTGCTACTACTACTCCTGGCTGTGGCA | |
| | G | |
| SH2D1A/NM_002 | AACAGGTTCTTGGAGTGCTGAGACAGCACCTGGGGTACATAAAAGATATTTCC | 26 |
| 351 | GGAAAATAAAAAATCTCATTTCAGCATTTCAGAAGCCAGATCAAGGCAT | |
| ISG20/NM_0022 | GGCGTGAGGCCAAGCTGGACCACTGCAGGCGTGTCTCCCTGCGGGTGCTGAGT | 27 |
| 01 | GAGCGCCTCCTGCACAAGAGCATCCAGAACAGCCTGCTTGGACACAGCTCGGT | |
| | GG | |
| GBP1/NM_00205 | TTTCTCCCTGGACTTGGAAGCAGATGGACAACCCCTCACACCAGATGAGTACC | 28 |
| 3 | TGACATACTCCCTGAAGCTGAAGAAAGGTACCAGTCAAAAAGATGAAA | |
| TBP/NM_003194 | CCAAGAAGAAAGTGAACATCATGGATCAGAACAACAGCCTGCCACCTTACGCT | 29 |
| | CAGGGCTTGGCCTCCCCTCAGGGTGCCATGACTCCCGGAATCCCTATCTTTAG | |
| | TC | |
| STAT6/NM_0031 | GGGGCCTGGAAGTGCCCGCTGAGAAAGGGAGAAGACAGCAGAGGGGTTGCCGA | 30 |
| 53 | GGCAACCTCCAAGTCCCAGATCATGTCTCTGTGGGGTCTGGTCTCCAAGATGC | |
| | CC | |
| ID3/NM_002167 | ATCCTACAGCGCGTCATCGACTACATTCTCGACCTGCAGGTAGTCCTGGCCGA | 31 |
| | GCCAGCCCCTGGACCCCCTGATGGCCCCCACCTTCCCATCCAGACAGCCGAGC | |
| CX3CL1/NM_002 | AAGATACCTGTAGCTTTGCTCATCCACTATCAACAGAACCAGGCATCATGCGG | 32 |
| 996 | CAAACGCGCAATCATCTTGGAGACGAGACAGCACAGGCTGTTCTGTGCCGACC | |
| | CG | |
| KLRB1/NM_0022 | TTGCCCTGAAACTTAGCTGTGCTGGGATTATTCTCCTTGTCTTGGTTGTTACT | 33 |
| 58 | GGGTTGAGTGTTTCAGTGACATCCTTAATACAGAAATCATCAATAGAAAAATG | |
| | C | |
| TNFSF4/NM_003 | ACAATTTACCGAATATAAGAAGGAGAAAGGTTTCATCCTCACTTCCCAAAAGG | 34 |
| 326 | AGGATGAAATCATGAAGGTGCAGAACAACTCAGTCATCA | |
| CD52/NM_00180 | CCAAGACAGCCACGAAGATCCTACCAAAATGAAGCGCTTCCTCTTCCTCCTAC | 35 |
| 3 | TCACCATCAGCCTCCTGGTTATGGTACAGATACAAACTGGACTCTCAGGACA | |
| IL10RA/NM_001 | TCCACCACATCCTCCACTGGACACCCATCCCAAATCAGTCTGAAAGTACCTGC | 36 |
| 558 | TATGAAGTGGCGCTCCTGAGGTATGGAATAGAGTCCTGGAACTCCATCTCC | |
| HLA- | TGATTAAAGCACCAGAGTGTAATGGCCCTCAGAGCAGGGCTGGTCCTGGGGTT | 37 |
| DOA/NM_002119 | CCACACCCTGATGACCCTCCTGAGCCCGCAGGAGGCAGGGGCCACCAAGGCTG | |
| | AC | |
| IFNB1/NM_0021 | GTGGAAATCCTAAGGAACTTTTACTTCATTAACAGACTTACAGGTTACCTCCG | 38 |
| 76 | AAACTGAAGATCTCCTAGCCTGTGCCTCTGGGACTGGACAATTGCTTCAAGCA | |
| | T | |
| CCR5/NM_00110 | CGTTCCCCTACAAGAAACTCTCCCCGGGTGGAACAAGATGGATTATCAAGTGT | 39 |
| 0168 | CAAGTCCAATCTATGACATCAATTATTATACATCGGAGCCCTGCCAAAAAATC | |
| | AA | |
| IKZF3/NM_0124 | GTGTGGATTATCCTGCATCAGCTTCAATGTCTTAATGGTTCATAAGCGAAGCC | 40 |
| 81 | ATACTGGTGAACGCCCATTCCAGTGTAATCAGTGTGGGGCATCTTTTACTCAG | |
| | A | |
| STAT1/NM_0073 | AGTGCTGAGTTGGCAGTTTTCTTCTGTCACCAAAAGAGGTCTCAATGTGGACC | 41 |
| 15 | AGCTGAACATGTTGGGAGAGAAGCTTCTTGGTCCTAACGCCAGCCCCGATGGT | |
| | CTC | |
| CD6/NM_006725 | GCAGGTTCCAGATGCCACCCTTGGAGGAAGGACTTGAAGAGTTGCATGCCTCC | 42 |
| | CACATCCCAACTGCCAACCCTGGACACTGCATTACAGACCCGCCATCCCTGGG | |
| | CCC | |
| BRCA1/NM_0073 | CTGAGTGACAAGGAATTGGTTTCAGATGATGAAGAAAGAGGAACGGGCTTGGA | 43 |
| 00 | AGAAAATAATCAAGAAGAGCAAAGCATGGATTCAAACTTAGGTGAAGCAGC | |
| CORO1A/NM_007 | GGCCCTGATCTGTGAGGCCAGCGGGGGAGGGGCCTTCCTGGTGCTGCCCCTGG | 44 |
| 074 | GCAAGACTGGACGTGTGGACAAGAATGCGCCCACGGTCTGTGGCCACACAGCC | |
| TBX21/NM_0133 | TTTGGGAAACTAAAGCTCACAAACAACAAGGGGGCGTCCAACAATGTGACCCA | 45 |
| 51 | GATGATTGTGCTCCAGTCCCTCCATAAGTACCAGCCCCGGCTGCATATCGTTG | |
| | AGGTG | |
| KLRK1/NM_0073 | CTCACCCAACCTACTAACAATAATTGAAATGCAGAAGGGAGACTGTGCACTCT | 46 |
| 60 | ATGCCTCGAGCTTTAAAGGCTATATAGAAAACTGTTCAACTCCAAATACGTAC | |
| CXCR6/NM_0065 | GCATCTCTGCTGGTGTTCATCAGAACAGACACCATGGCAGAGCATGATTACCA | 47 |
| 64 | TGAAGACTATGGGTTCAGCAGTTTCAATGACAGCAGCCAGGAGGAGCATCAA | |
| PTEN/NM_00031 | TATCTAGTACTTACTTTAACAAAAAATGATCTTGACAAAGCAAATAAAGACAA | 48 |
| 4 | AGCCAACCGATACTTTTCTCCAAATTTTAAGGTGAAGCTGTACTTCACAAAA | |
| PMEL/NM_00692 | CCAGAGTGGACAGAAGCCCAGAGACTTGACTGCTGGAGAGGTGGTCAAGTGTC | 49 |
| 8 | CCTCAAGGTCAGTAATGATGGGCCTACACTGATTGGTGCAAATGCCTCCTTCT | |
| DMBT1/NM_0073 | AGCACCAACCTGCTCTGTCTGCCAAATCACATGCAAGCCAGTGTGAGCAGGAG | 50 |
| 29 | CTATCTCCAATCCTTGGGCTTTTCTGCCAGTGACCTTGTCATTTCCACCTGGA | |
| IFI44L/NM_006 | CTTCAAGACAACTTTTTAAACATGAGTAGATCTATGACTTCTCAAAGCCGGGT | 51 |
| 820 | CATGAATGTCCATAAAATGCTAGGCATTCCTATTTCCAATATTTTG | |
| LAPTM5/NM_006 | CATGGAAGTGCCCACCTATCTCAACTTCAAGTCCATGAACCACATGAATTACC | 52 |
| 762 | TCCCCAGCCAGGAGGATATGCCTCATAACCAGTTCATCAAGATGATGATCATC | |
| | TTT | |
| CD226/NM_0065 | GTCACAGTCTCAGACTCGGGGCTTTACCGCTGCTACTTGCAGGCCAGCGCAGG | 53 |
| 66 | AGAAAACGAAACCTTCGTGATGAGATTGACTGTAGCCGAGGGTAAAACCGA | |
| TNFSF13B/NM_0 | CTCAGCTTTAAAAGGGGAAGTGCCCTAGAAGAAAAAGAGAATAAAATATTGGT | 54 |
| 06573 | CAAAGAAACTGGTTACTTTTTTATATATGGTCAGGTTTTATATACTGATAAG | |
| ICOS/NM_01209 | TATTACTTCTGCAACCTATCAATTTTTGATCCTCCTCCTTTTAAAGTAACTCT | 55 |
| 2 | TACAGGAGGATATTTGCATATTTATGAATCACAACTTTGTTGCCAGCTGAAG | |
| CD160/NM_0070 | CTGGGCCTGCTGACAGCGTGCAGGATGCTGTTGGAACCCGGCAGAGGCTGCTG | 56 |
| 53 | TGCCCTGGCCATCCTGCTGGCAATTGTGGACATCCAGTCTGGTGGATGCATTA | |
| TRIM29/NM_012 | GAATCATAGCACCGTGACAGTGGAGGAGGCCAAGGCCGAGAAGGAGACGGAGC | 57 |
| 101 | TGTCATTGCAAAAGGAGCAGCTGCAGCTCAAGATCATTGAGATTGAGGATGAA | |
| | GC | |
| LST1/NM_00716 | CCAGCCCCTGATCATTTCGCCTAAAAGAGCAAGGACTAGAGTTCCTGACCTCC | 58 |
| 1 | AGGCCAGTCCCTGATCCCTGACCTAATGTTATCGCGGAATGATGA | |
| ZBTB46/NM_025 | GCCTGCTGTCGCTGAAGGCCGACGTGCTGGGGGATGACGGCTCCCTGCTGTTC | 59 |
| 224 | GAGTACCTGCCCAGAGGGGCCCACTCGCTGTCCCTGAATGAGTTCACGGTG | |
| VTCN1/NM_0246 | GGCAGCGGCAGCTCCACTCAGCCAGTACCCAGATACGCTGGGAACCTTCCCCA | 60 |
| 26 | GCCATGGCTTCCCTGGGGCAGATCCTCTTCTGGAGCATAATTAGCATCATCAT | |
| | TA | |
| KREMEN1/NM_03 | AAGATACTTCTGCACGTCACATTCAAATCCCATCGTGTTCCTGCTTCAGGGGA | 61 |
| 2045 | CCTTAGGGATTGTCATCAACCAGGGACTTCGGGGGAAATCTGGAGCATTT | |
| PDCD1LG2/NM_0 | CACCAGATAGCAGCTTTATTCACAGTGACAGTCCCTAAGGAACTGTACATAAT | 62 |
| 25239 | AGAGCATGGCAGCAATGTGACCCTGGAATGCAACTTTGACACTGGAAGTCATG | |
| | TG | |
| TUBB/NM_17801 | TGGCCAGATCTTTAGACCAGACAACTTTGTATTTGGTCAGTCTGGGGCAGGTA | 63 |
| 4 | ACAACTGGGCCAAAGGCCACTACACAGAGGGCGCCGAGCTGGTTGATTCTGTC | |
| | CTGG | |
| CLEC4C/NM_130 | TGACCCTGCATGGTGTGCGGTGCCCTCCTGCCTCAGGCCGCGAAGAAGGATCT | 64 |
| 441 | AAGGGCTTGGCTTGTTTGAAAGAACCACACCCCGAAAGTAACATCTTTGGAGA | |
| | A | |
| CD86/NM_17586 | TGTGATGGCCTTCCTGCTCTCTGGTGCTGCTCCTCTGAAGATTCAAGCTTATT | 65 |
| 2 | TCAATGAGACTGCAGACCTGCCATGCCAATTTGCAAACTCTCAAA | |
| HAVCR2/NM_032 | TCCCAGGCATAATGAATGATGAAAAATTTAACCTGAAGTTGGTCATCAAACCA | 66 |
| 782 | GCCAAGGTCACCCCTGCACCGACTCGGCAGAGAGACTTCACTGCAGCCTTTCC | |
| | AAGGA | |
| GZMH/NM_03342 | GAGAAGAGTCGGAAGAGGTGTGGCGGCATCCTAGTGAGAAAGGACTTTGTGCT | 67 |
| 3 | GACAGCTGCTCACTGCCAGGGAAGCTCCATAAATGTCACCTTGGGGGCCCACA | |
| NFATC1/NM_172 | GCGAGAGCCTGAAGAGTTGGACCAGTTGTACCTGGATGACGTAAATGAAATAA | 68 |
| 387 | TACGAAATGACCTCTCCAGCACGAGCACCCACTCCTAGTTGCCACATTGGAGC | |
| | A | |
| CD8B/NM_17221 | CTGCATGATCGTCGGGAGCCCCGAGCTGACCTTCGGGAAGGGAACTCAGCTGA | 69 |
| 3 | GTGTGGTTGATTTCCTTCCCACCACTGCCCAGCCCACCAAGAAGTCCACCCTC | |
| | A | |
| BCL2/NM_00063 | GGCACCTGCACACCTGGATCCAGGATAACGGAGGCTGGGATGCCTTTGTGGAA | 70 |
| 3 | CTGTACGGCCCCAGCATGCGGCCTCTGTTTGATTTCTCCTGGCTGTCTCTG | |
| GADD45GIP1/NM | GGCGACCATGCAGGAGTCGCTGCGGGTGAAGCAGCTGGCCGAAGAGCAGAAGC | 71 |
| _052850 | GTCGGGAGAGGGAGCAGCACATCGCAGAGTGCATGGCCAAGATGCCA | |
| CBLB/NM_17066 | CGGCGCCGAAAGAACTAAAATTCCAGATGGCAAACTCAATGAATGGCAGAAAC | 72 |
| 2 | CCTGGTGGTCGAGGAGGAAATCCCCGAAAAGGTCGAATTTTGGGTATTATTGA | |
| | TGCTA | |
| ITGA1/NM_1815 | GACACAGCAAGAAAGGAGGCATTCACGGAAGCCCGGGGTGCCCGAAGAGGAGT | 73 |
| 01 | TAAAAAAGTCATGGTTATTGTGACAGATGGAGAGTCTCATGACAATC | |
| CD8A/NM_17182 | GTCCCCGGCCTGTGGTCAAATCGGGAGACAAGCCCAGCCTTTCGGCGAGATAC | 74 |
| 7 | GTCTAACCCTGTGCAACAGCCACTACATTACTTCAAACTGAGATCCTTCCT | |
| IL2RA/NM_0004 | TGGGGACTGCTCACGTTCATCATGGTGCCTGGCTGCCAGGCAGAGCTCTGTGA | 75 |
| 17 | CGATGACCCGCCAGAGATCCCACACGCCACATTCAAAGCCATGGC | |
| EIF2AK2/NM_00 | CCACACTTCCGTGATTATCTGCGTGCATTTTGGACAAAGCTTCCAACCAGGAT | 76 |
| 1135651 | ACGGGAAGAAGAAATGGCTGGTGATCTTTCAGCAGGTTTCTTCATGG | |
| MADCAM1/NM_13 | CAACAGGCTCGTCCAAACCTGCGGGTGACCAGCTGCCCGCGGCTCTGTGGACC | 77 |
| 0760 | AGCAGTGCGGTGCTGGGACTGCTGCTCCTGGCCTTGCCCACC | |
| PTPN6/NM_0805 | CTATCCCCCAGCCATGAAGAATGCCCATGCCAAGGCCTCCCGCACCTCGTCCA | 78 |
| 48 | AACACAAGGAGGATGTGTATGAGAACCTGCACACTAAGAACAAGAGGGAGGAG | |
| | AAAG | |
| LRG1/NM_05297 | GCAGACAGCGACCAAAAAGCCCAGGGGGCATTCAACCCCATGTTTCTAGAACT | 79 |
| 2 | CTGTTCCTGCTGCTGCTGTTGGCAGCCTCAGCCTGGGGGGTCACCCTGAGCCC | |
| | C | |
| ADGRE5/NM_078 | TCTTCGACGATCGGAGCTTGGTGCTGACCTATGTGTTTACCATCCTCAACTGC | 80 |
| 481 | CTGCAGGGCGCCTTCCTCTACCTGCTGCACTGCCTGCTCAACAAGAAGGTTCG | |
| | GGA | |
| SH2D1B/NM_053 | TTGCTGCTCAAGGAAGGGGTGGATGGCAACTTTCTTTTAAGAGACAGCGAGTC | 81 |
| 282 | GATACCAGGAGTCCTGTGCCTCTGTGTCTCGTTTAAAAATATTGTCTAC | |
| ITGB2/NM_0002 | TGACCGTGCAGGTTCTTCCCCAGTGTGAGTGCCGGTGCCGGGACCAGAGCAGA | 82 |
| 11 | GACCGCAGCCTCTGCCATGGCAAGGGCTTCTTGGAGTGCGGCATCTGCAGGTG | |
| HLA- | TCCATATCAGAGCTGTGATCTTGAGAGCCCTCTCCTTGGCTTTCCTGCTGAGT | 83 |
| DPA1/NM_03355 | CTCCGAGGAGCTGGGGCCATCAAGGCGGACCATGTGTCAACTTATGCCGCGTT | |
| 4 | TG | |
| DGAT2/NM_0325 | AGGTCCAAGGTGGAAAAGCAGCTACAGGTCATCTCAGTGCTCCAGTGGGTCCT | 84 |
| 64 | GTCCTTCCTTGTACTGGGAGTGGCCTGCAGTGCCATCCTCATGTACATATTCT | |
| | GCA | |
| IGF1R/NM_0008 | CATGCCTTGGTCTCCTTGTCCTTCCTAAAAAACCTTCGCCTCATCCTAGGAGA | 85 |
| 75 | GGAGCAGCTAGAAGGGAATTACTCCTTCTACGTCCTCGACAACCAGAACTTGC | |
| | AGC | |
| TAGAP/NM_0541 | TGCTCACCCTGGAGAATGACCAGAGCCTGTCATTTGAAGCCCAGAAGGACCTG | 86 |
| 14 | AACAACAAGGTGAAGACACTGGTGGAATTCCTCATTGATAACTGCTTTGAAAT | |
| | A | |
| LMNA/NM_17070 | AAGGAGCTGAAAGCGCGCAATACCAAGAAGGAGGGTGACCTGATAGCTGCTCA | 87 |
| 7 | GGCTCGGCTGAAGGACCTGGAGGCTCTGCTGAACTCCAAGGAGGCCGCACTGA | |
| | GC | |
| NGAM1/NM_1813 | CTGAACAAGTGTGGCCTGTTCATGTGCATTGCGGTCAACCTGTGTGGAAAAGC | 88 |
| 51 | CGGGCCCGGGGCCAAGGGCAAGGACATGGAGGAGGGCAAGGCCGCCTTCTCGA | |
| | AA | |
| TIGIT/NM_1737 | CAGGGGAGTACTTCTGCATCTATCACACCTACCCTGATGGGACGTACACTGGG | 89 |
| 99 | AGAATCTTCCTGGAGGTCCTAGAAAGCTCAGTGGCTGAGCACGGTGCCAGGTT | |
| | CC | |
| ILI7F/NM_0528 | AAGAGCTTCCTGCACAAAGTAAGCCACCAGCGCAACATGACAGTGAAGACCCT | 90 |
| 72 | GCATGGCCCAGCCATGGTCAAGTACTTGCTGCTGTCGATATTGGGGCTTGC | |
| HLA-F- | CTGCAGCTGTGCTCACACCTGGAGGAAACCTCAATGGTCACATCCTCTTTCCT | 91 |
| AS1/NR_026972 | GTGTCAAGAAGCATCGTCCGGGGAGGTGAGAAGAAGACAGTCCTCCCTAGAAT | |
| | TG | |
| CD247/NM_1980 | GGAAGGCGCTTTTCACCGCGGCCATCCTGCAGGCACAGTTGCCGATTACAGAG | 92 |
| 53 | GCACAGAGCTTTGGCCTGCTGGATCCCAAACTCTGCTACCTGCTGGA | |
| CD79B/NM_0010 | CCAGGGCTGCGGCACAGAGCTGCGAGTCATGGGATTCAGCACCTTGGCACAGC | 93 |
| 39933 | TGAAGCAGAGGAACACGCTGAAGGATGGTATCATCATGATCCAGACGCTGCTG | |
| IDO2/NM_19429 | CAAGCTCATGTGGACAAGATGCCCCTGCTGAGCTGCCAGTTCCTGAAGGGTCA | 94 |
| 4 | CCGGGAGCAGCGCCTGGCCCACCTGGTCCTGAGCTTCCTCACCATGGGTTA | |
| IL4/NM_000589 | TTCCTGAAACGGCTCGACAGGAACCTCTGGGGCCTGGCGGGCTTGAATTCCTG | 95 |
| | TCCTGTGAAGGAAGCCAACCAGAGTACGTTGGAAAACTTCTTGG | |
| TYROBP/NM_198 | TCAGGAGCTCCAGGGTCAGAGGTCGGATGTCTACAGCGACCTCAACACACAGA | 96 |
| 125 | GGCCGTATTACAAATGAGCCCGAATCATGACAGTCAGCAACATGATACCTGG | |
| BTLA/NM_18178 | GGAACTGGGAAATTATTTTGGGTCTTCTTCTTAATCCCATATCTGGACATCTG | 97 |
| 0 | GAACATCCATGGGAAAGAATCATGTGATGTACAGCTTTATATAAAGAGACAAT | |
| | C | |
| AKT1/NM_00101 | GTGAAGGAGGGTTGGCTGCACAAACGAGGGGAGTACATCAAGACCTGGCGGCC | 98 |
| 4431 | ACGCTACTTCCTCCTCAAGAATGATGGCACCTTCATTGGCTACAAGGAGCGGC | |
| | CGC | |
| IL2RG/NM_0002 | ATCTCTGTTGGCTCCATGGGATTGATTATCAGCCTTCTCTGTGTGTATTTCTG | 99 |
| 06 | GCTGGAACGGACGATGCCCCGAATTCCCACCCTGAAGAACCTAGAGGATCT | |
| POLR2A/NM_000 | TCTTCCTGCGCTGCATCGAGTCCAACATGCTGACAGATATGACCCTGCAGGGC | 100 |
| 937 | ATCGAGCAGATCAGCAAGGTGTACATGCACTTGCCACAGACAGACAAC | |
| ITGAX/NM_0008 | GTTCTAAGAACCTGCTTGGGAGCCGTGACCTCCAAAGCTCTGTGACCTTGGAC | 101 |
| 87 | CTGGCCCTCGACCCTGGCCGCCTGAGTCCCCGTGCCACCTTCCAGGAAAC | |
| IL1B/NM_00057 | TGATAAGCCCACTCTACAGCTGGAGAGTGTAGATCCCAAAAATTACCCAAAGA | 102 |
| 6 | AGAAGATGGAAAAGCGATTTGTCTTCAACAAGATAGAAATCAATAACAAGCTG | |
| | G | |
| CSF2RB/NM_000 | GGCAGAGAAACACATAAAGAGCTCAGTGAACATCCAGATGGCCCCTCCATCCC | 103 |
| 395 | TCAACGTGACCAAGGATGGAGACAGCTACAGCCTGCGCTGGGAAACAATGA | |
| DDX58/NM_0143 | CTGAATGTTTAATTAATCAGGAATGTGAAGAAATTCTACAGATTTGCTCTACT | 104 |
| 14 | AAGGGGATGATGGCAGGTGCAGAGAAATTGGTGGAATGCCTTCTCAGATC | |
| KIAA0101/NM_0 | AAGGAATTGGAGAATTCTTTAGGTTGTCCCCTAAAGATTCTGAAAAAGAGAAT | 105 |
| 14736 | CAGATTCCTGAAGAGGCAGGAAGCAGTGGCTTAGGAAAAGCAAAGAGAAAAGC | |
| | A | |
| CD274/NM_0141 | TGGTGGTGCCGACTACAAGCGAATTACTGTGAAAGTCAATGCCCCATACAACA | 106 |
| 43 | AAATCAACCAAAGAATTTTGGTTGTGGATCCAGTCACCTCTGAACATGAACTG | |
| | AC | |
| LAMP3/NM_0143 | AGTGCGTGAGTGAACAGAGCCTCCAGTTGTCAGCCCACCTGCAGGTGAAAACA | 107 |
| 98 | ACCGATGTCCAACTTCAAGCCTTTGATTTTGAAGATGACCACTTTGGAAATGT | |
| | GG | |
| TNFAIP8/NM_01 | TTATGCACTCCGAAGCAGAAGAATCCAAGGAAGTGGCCACAGATGTCTTTAAT | 108 |
| 4350 | TCCAAAAACCTGGCCGTTCAGGCACAAAAGAAGATCTTGGGTAAAATGGTGTC | |
| | C | |
| FOXP3/NM_0140 | GAAGGGCAGGGCACAATGTCTCCTCCAGAGAGAGATGGTACAGTCTCTGGAGC | 109 |
| 09 | AGCAGCTGGTGCTGGAGAAGGAGAAGCTGAGTGCCATGCAGGCCCACCTGGCT | |
| | GGGA | |
| IL12A/NM_0008 | GACCATGAATGCAAAGCTTCTGATGGATCCTAAGAGGCAGATCTTTCTAGATC | 110 |
| 82 | AAAACATGCTGGCAGTTATTGATGAGCTGATGCAGGCCCTGAATTTCAAC | |
| SAMHD1/NM_015 | ATATTTTGTTCAGTGGTGTGCAGACAGAAATTTCACCAAGCCGCAGGATGGCG | 111 |
| 474 | ATGTTATAGCCCCACTCATAACACCTCAAAAAAAGGAATGGAACGACAGTACT | |
| SIT1/NM_014450 | TCTGCAGCCATGAGCAGAGGCGACAACTGCACGGATCTACTCGCACTGGGAAT | 112 |
| | CCCCTCCATAACCCAGGCCTGGGGACTGTGGGTCCTCTTAGGGGCTGTGACGC | |
| CD3E/NM_00073 | CTGGGGGCTTGCTGCTGCTGGTTTACTACTGGAGCAAGAATAGAAAGGCCAAG | 113 |
| 3 | GCCAAGCCTGTGACACGAGGAGCGGGTGCTGGCGGCAGGCAAAGGGGACA | |
| ICOSLG/NM_015 | GCCAATCCCTGGGATTCCAGGAGGTTTTGAGCGTTGAGGTTACACTGCATGTG | 114 |
| 259 | GCAGCAAACTTCAGCGTGCCCGTCGTCAGCGCCCCCCACAGCCCCTCCCAGG | |
| HGF/NM_000601 | GAACATGGAAGACTTACATCGTCATATCTTCTGGGAACCAGATGCAAGTAAGC | 115 |
| | TGAATGAGAATTACTGCCGAAATCCAGATGATGATGCTCATGGACCCTGG | |
| MELK/NM_01479 | AAAAATCATGGATAAAAACACACTAGGGAGTGATTTGCCCCGGATCAAAACGG | 116 |
| 1 | AGATTGAGGCCTTGAAGAACCTGAGACATCAGCATATATGTCAACTCT | |
| IGSF6/NM_0058 | TTGAGTTCCACATGCAGAGCAGATGCGACAGCTAGAAGTGAGTAGGGCCCAGA | 117 |
| 49 | CCCTGGCCCAGGAAGATCCACTAAAGGAGGCCATCCTTCCGCCTTCTTCTGCA | |
| | GGAGTCAGGATGGAAAGGCAGATGTAAAGTCCCTCATGGCGAAATATAACACG | |
| | GGGGGCAACCCGACAGAGGATGTCTCAGTCAATAGCCGACCCTTCAGAGTCAC | |
| | AGGGCCAAACTCATCTTCAGGAATACAAGCAAGAAAGAACTTATTCAACAACC | |
| | AAGGAAATGCCAGCCCTCCTGCAGGACCCAGCAATGTACCTAAGTTTGGGTCC | |
| | CCAAAGCCACCTGTGGCAGTCAAACCTTCTTCTGAGGAAAAGCCTGACAAGGA | |
| | ACCCAAGCCCCCGTTTCTAAAGCCCACTGGAGCAGGCCAAAGATTCGGAACAC | |
| | CAGCCAGCTTGACCACCAGAGACCCCGAGGCGAAAGTGGGATTTCTGAAACCT | |
| | GTAGGCCCCAAGCCCATCAACTTGCCCAAAGAAGATTCCAAACCTACATTTCC | |
| | CTGGCCTCCTGGAAACAAGCCATCTCTTCACAGTGTAAACCAAGACCATGACT | |
| | TAAAGCCACTAGGCCCGAAATCTGGGCCTACTCCTCCAACCTCAGAAAATGAA | |
| | CAGAAGCAAGCGTTTCCCAAATTGACTGGGGTTAAAGGGAAATTTATGTCAGC | |
| | ATCACAAGATCTTGAACCCAAGCCCCTCTTCCCCAAACCCGCCTTTGGCCAGA | |
| | AGCCGCCCCTAAGTACCGAGAACTCCCATGAAGACGAAAGCCCCATGAAGAAT | |
| | GTGTCTTCATCAAAAGGGTCCCCAGCTCCCCTGGGAGTCAGGTCCAAAAGCGG | |
| | CCCTTTAAAACCAGCAAGGGAAGACTCAGAAAATAAAGACCATGCAGGGGAGA | |
| | TTTCAAGTTTGCCCTTTCCTGGAGTGGTTTTGAAACCTGCTGCGAGCAGGGGA | |
| | GGCCCAGGTCTCTCCAAAAATGGTGAAGAAAAAAAGGAAGATAGGAAGATAGA | |
| | TGCTGCTAAGAACACCTTCCAGAGCAAAATAAATCAGGAAGAGTTGGCCTCAG | |
| | GGACTCCTCCTGCCAGGTTCCCTAAGGCCCCTTCTAAGCTGACAGTGGGGGGG | |
| | CCATGGGGCCAAAGTCAGGAAAAGGAAAAGGGAGACAAGAATTCAGCCACCCC | |
| | GAAACAGAAGCCATTGCCTCCCTTGTTTACCTTGGGTCCACCTCCACCAAAAC | |
| | CCAACAGACCACCAAATGTTGACCTGACGAAATTCCACAAAACCTCTTCTGGA | |
| | AACAGTACTAGCAAAGGCCAGACGTCTTACTCAACAACTTCCCTGCCACCACC | |
| | TCCACCATCCCATCCGGCCAGCCAACCACCATTGCCAGCATCTCAC | |
| GNLY/NM_00643 | TCCTGCCCGTGCCTGGCCCAGGAGGGCCCCCAGGGTGACCTGTTGACCAAAAC | 118 |
| 3 | ACAGGAGCTGGGCCGTGACTACAGGACCTGTCTGACGATAGTCCAAAAACTGA | |
| TD02/NM_00565 | GCCTTTTCACCATGAGTGGGTGCCCATTTTTAGGAAACAACTTTGGATATACT | 119 |
| 1 | TTTAAAAAACTCCCCGTAGAAGGCAGCGAAGAAGACAAATCACAAACTGGTGT | |
| | G | |
| KRT7/NM_00555 | TCATCGACAAGGTGCGGTTCCTGGAGCAGCAGAACAAGGTTCTGGACACCAAG | 120 |
| 6 | TGGACCCTGCTGCAGGAGCAGGGCACCAAGACTGTGAGGCAGAACCTGGAGCC | |
| | GTTGTTCGAGCAGTACATCAACAACCTCAGGAGGCAGCTGGACAGCATCGTGG | |
| | GGGAACGGGGCCGCCTGGACTCAGAGCTGAGAAACATGCAGGACCTGGTGGAA | |
| | GACTTCAAGAACAAGTATGAGGATGAAATCAACAAGCGTACCACTGCTGAGAA | |
| | TGAGTTTGTGATGCTGAAGAAGGATGTAGATGCTGCCTACATGAACAAGGTGG | |
| | AGCTGGAGGCCAAGGTTGATGCACTGATGGATGAGATTAACTTCATGAAGATG | |
| | TTCTTTGATGCGGAGCTGTCCCAGATGCAGACGCATGTCTCTGACACCTCAGT | |
| | GGTCCTCTCCATGGACAACAACCGCAACCTGGAC | |
| HLA- | TCTGAGGCGGAGCACCAGAGAGCCTACCTGGAAGACACATGCGTGGAGTGGCT | 121 |
| E/NM_005516 | CCACAAATACCTGGAGAAGGGGAAGGAGACGCTGCTTCACCTGGAGCCCCCAA | |
| | AG | |
| HLA- | CTGCTGGAGAATGTGCTGTGTGGCGTGGCCTTTGGCCTGGGTGTGCTGGGCAT | 122 |
| DMA/NM_006120 | CATCGTGGGCATTGTTCTCATCATCTACTTCCGGAAGCCTTGCTCAGGTGAC | |
| LAMP1/NM_0055 | ATGGTGAAAAATGGCAACGGGACCGCGTGCATAATGGCCAACTTCTCTGCTGC | 123 |
| 61 | CTTCTCAGTGAACTACGACACCAAGAGTGGCCCTAAGAACATGACCTTTGACC | |
| | TGCCA | |
| NTN3/NM_00618 | CCCTGGCCGTGCCCTGAGTGACCGTCGGGCTTGCAGGGCCTGCGACTGTCACC | 124 |
| 1 | CGGTTGGTGCTGCTGGCAAGACCTGCAACCAGACCACAGGCC | |
| CD28/NM_00613 | AGAGCAATGGAACCATTATCCATGTGAAAGGGAAACACCTTTGTCCAAGTCCC | 125 |
| 9 | CTATTTCCCGGACCTTCTAAGCCCTTTTGGGTGCTGGTGGTGGTTGGTGG | |
| TARP/NM_00100 | CAATTGTTCAAAAGATGCAAATGATACACTACTGCTGCAGCTCACAAACACCT | 126 |
| 3806 | CTGCATATTACATGTACCTCCTCCTGCTCCTCAAGAGTGTGGTCTATT | |
| EGFR/NM_00522 | GGCCCGAGACCCCCAGCGCTACCTTGTCATTCAGGGGGATGAAAGAATGCATT | 127 |
| 8 | TGCCAAGTCCTACAGACTCCAACTTCTACCGTGCCCTGATGGATGAAGAA | |
| CCR4/NM_00550 | GCCTCACAGACCTTCCTCAGAGCCGCTTTCAGAAAAGCAAGCTGCTTCTGGTT | 128 |
| 8 | GGGCCCAGACCTGCCTTGAGGAGCCTGTAGAGTTAAAAAATGAACCCCACGGA | |
| MAGEA3/NM_005 | CGGCCTGACGTCGGTGGAGGGAAGCAGGCGCAGGCTCCGTGAGGAGGCAAGGT | 129 |
| 362 | TCTGAGGAGACAGGCCCCGGAGCAGCACTAGCTCCTGCCCACACTCCTACC | |
| BATF/NM_00639 | CAGCCATGCCTCACAGCTCCGACAGCAGTGACTCCAGCTTCAGCCGCTCTCCT | 130 |
| 9 | CCCCCTGGCAAACAGGACTCATCTGATGATGTGAGAAGAGTTCAGAGGAGGGA | |
| | GA | |
| KLRG1/NM_0058 | GGTCTGAGGAACAATTCTGGCTGGAGGTGGGAAGATGGATCACCTCTAAACTT | 131 |
| 10 | CTCAAGGATTTCTTCTAATAGCTTTGTGCAGACATGCGGTGCCATCAACAAAA | |
| | AT | |
| IRS1/NM_00554 | TAAGCGCCTATGCCAGCATCAGTTTCCAGAAGCAGCCAGAGGACCGTCAGTAG | 132 |
| 4 | CTCAACTGGACATCACAGCAGAATGAAGACCTAAATGACCTCAGCAA | |
| CSF1R/NM_0052 | AGGGCAACAGTTATACTTTCATCGACCCCACGCAGCTGCCTTACAACGAGAAG | 133 |
| 11 | TGGGAGTTCCCCCGGAACAACCTGCAGTTTGGTAAGACCCTCGGAGCTGGAGC | |
| CTLA4/NM_0052 | GGCAACGGAACCCAGATTTATGTAATTGATCCAGAACCGTGCCCAGATTCTGA | 134 |
| 14 | CTTCCTCCTCTGGATCCTTGCAGCAGTTAGTTCGGGGTTGTTTTTTTATAGC | |
| TNFSF18/NM_00 | GATCATCCTGGAAGCTGTGGCTCTTTTGCTCAATAGTTATGTTGCTATTTCTT | 135 |
| 5092 | TGCTCCTTCAGTTGGCTAATCTTTATTTTTCTCCAATTAGAGACTGC | |
| POU2AF1/NM_00 | AAAAGGCAACATCCTGTCACAGGCCATGCTCTGGCAAAAACCCACAGCTCCGG | 136 |
| 6235 | AGCAAGCCCCAGCCCCGGCCCGGCCATACCAGGGCGTCCGTGTGAAGGAGCCA | |
| | G | |
| GZMA/NM_00614 | GGTCCTACTTAGTCTTGACAGAAAAACCATCTGTGCTGGGGCTTTGATTGCAA | 137 |
| 4 | AAGACTGGGTGTTGACTGCAGCTCACTGTAACTTGAACAAAAGGTCC | |
| PIK3CA/NM_006 | AAGAGTACCTTGTTCCAATCCCAGGTGGAATGAATGGCTGAATTATGATATAT | 138 |
| 218 | ACATTCCTGATCTTCCTCGTGCTGCTCGACTTTGCCTTTCCATTTGCTCTGTT | |
| ITK/NM_005546 | CTGAAGACAACAGGCGACCACTTTGGGAACCTGAAGAAACTGTGGTCATTGCC | 139 |
| | TTATATGACTACCAAACCAATGATCCTCAGGAACTCGCACTGCGGCGCAACGA | |
| IFI27/NM_0055 | CACATTCTCAGGAACTCTCCTTCTTTGGGTCTGGCTGAAGTTGAGGATCTCTT | 140 |
| 32 | ACTCTCTAGGCCACGGAATTAACCCGAGCAGGCATGGAGGCCTCTGCTCTCAC | |
| EOMES/NM_0054 | AATGTGTTCGTAGAGGTGGTGCTGGCGGACCCCAACCACTGGCGCTTCCAGGG | 141 |
| 42 | GGGCAAATGGGTGACCTGTGGCAAAGCCGACAATAACATGCAGGGCAACAAA | |
| LCN2/NM_00556 | GATCCCAGCCCCACCTCTGAGCAAGGTCCCTCTGCAGCAGAACTTCCAGGACA | 142 |
| 4 | ACCAATTCCAGGGGAAGTGGTATGTGGTAGGCCTGGCAGGGAATGCAATTCTC | |
| CD80/NM_00519 | GCTCTTGGTGCTGGCTGGTCTTTCTCACTTCTGTTCAGGTGTTATCCACGTGA | 143 |
| 1 | CCAAGGAAGTGAAAGAAGTGGCAACGCTGTCCTGTGGTCACAATGTT | |
| CD83/NM_00423 | CTCGGGGACATACAGGTGCACTCTGCAGGACCCGGATGGGCAGAGAAACCTAA | 144 |
| 3 | GTGGCAAGGTGATCTTGAGAGTGACAGGATGCCCTGCACAGCGTAAA | |
| CXCL13/NM_006 | TTATCCCTAGACGCTTCATTGATCGAATTCAAATCTTGCCCCGTGGGAATGGT | 145 |
| 419 | TGTCCAAGAAAAGAAATCATAGTCTGGAAGAAGAACAAGTCAATTGTGTGTG | |
| MTOR/NM_00495 | TTGGGGAAAGGAACGTGAAAGGCATGTTTGAGGTGCTGGAGCCCTTGCATGCT | 146 |
| 8 | ATGATGGAACGGGGCCCCCAGACTCTGAAGGAAACATCCTTTAATCAGG | |
| FCER1G/NM_004 | CCAGCAGTGGTCTTGCTCTTACTCCTTTTGGTTGAACAAGCAGCGGCCCTGGG | 147 |
| 106 | AGAGCCTCAGCTCTGCTATATCCTGGATGCCATCCTGTTTCTGTATGGAATTG | |
| | T | |
| TFRC/NM_00112 | CAATCACACTCAGTTTCCACCATCTCGGTCATCAGGATTGCCTAATATACCTG | 148 |
| 8148 | TCCAGACAATCTCCAGAGCTGCTGCAGAAAAGCTGTTTGGGAATATGGAAGGA | |
| | G | |
| RORC/NM_00506 | TGTGCCGGGCCTACAATGCTGACAACCGCACGGTCTTTTTTGAAGGCAAATAC | 149 |
| 0 | GGTGGCATGGAGCTGTTCCGAGCCTTGGGCTGCAGCGAGCTCATCAGCTCCAT | |
| MMP9/NM_00499 | GGCTTCTGCCCGGACCAAGGATACAGTTTGTTCCTCGTGGCGGCGCATGAGTT | 150 |
| 4 | CGGCCACGCGCTGGGCTTAGATCATTCCTCAGTGCCGGAGGCGCTCATGTACC | |
| | CTA | |
| BST2/NM_00433 | GCAACAAGAGCTGACCGAGGCCCAGAAGGGCTTTCAGGATGTGGAGGCCCAGG | 151 |
| 5 | CCGCCACCTGCAACCACACTGTGATGGCCCTAATGGCTTCCCTGGATGCAG | |
| PIK3CD/NM_005 | GGCTCCTTCGCCATCAAGTCGCTGCGGAAACTGACGGACGATGAGCTGTTCCA | 152 |
| 026 | GTACCTGCTGCAGCTGGTGCAGGTGCTCAAGTACGAGTCCTACCTGGACTGCG | |
| | AGCTG | |
| FCGR2B/NM_004 | GGGGATCATTGTGGCTGTGGTCACTGGGATTGCTGTAGCGGCCATTGTTGCTG | 153 |
| 001 | CTGTAGTGGCCTTGATCTACTGCAGGAAAAAGCGGATTTCAGCTCTCCCAGGA | |
| | TACCC | |
| TNFRSF14/NM_0 | CCAAGTGCAGCTGGCTGGTGACGAAGGCCGGAGCTGGGACCAGCAGCTCCCAC | 154 |
| 03820 | TGGGTATGGTGGTTTCTCTCAGGGAGCCTCGTCATCGTCATTGTTTGCTCC | |
| OAS3/NM_00618 | TTCGCCCAGCCAAGTTGAAGAACCTAATCTTGCTGGTGAAGCACTGGTACCAC | 155 |
| 7 | CAGGTGTGCCTACAGGGGTTGTGGAAGGAGACGCTGCCCCCGGTCTATGCCCT | |
| | GGA | |
| GRAP2/NM_0048 | TGATTTCACTGCTTCAGGTGAGGATGAACTGAGCTTTCACACTGGAGATGTTT | 156 |
| 10 | TGAAGATTTTAAGTAACCAAGAGGAGTGGTTTAAGGCGGAGCTTGGGAGCC | |
| CCNB2/NM_0047 | ACTTCTTAAGGCGAGCATCAAAAGCCGGGGAGGTTGATGTTGAACAGCACACT | 157 |
| 01 | TTAGCCAAGTATTTGATGGAGCTGACTCTCATCGACTATGATATGGTGCATTA | |
| | TCA | |
| MLANA/NM_0055 | TCCTGGGAGTCTTACTGCTCATCGGCTGTTGGTATTGTAGAAGACGAAATGGA | 158 |
| 11 | TACAGAGCCTTGATGGATAAAAGTCTTCATGTTGGCACTCAATGTGCCTTAAC | |
| MAGEA12/NM_00 | CGGCCTGACGTCGGTGGAGGGAAGCAGGCGCAGGCTCCGTGAGGAGGCAAGGT | 159 |
| 5367 | TCTGAGGAGACAGGCCCCGGAGCAGCACTAGCTCCTGCCCACACTCCTACC | |
| VGAM1/NM_0010 | AATGGATTCTGTGCCCACAGTAAGGCAGGCTGTAAAAGAATTGCAAGTCTACA | 160 |
| 78 | TATCACCCAAGAATACAGTTATTTCTGTGAATCCATCCACAAAGCTGCAAG | |
| CDKN3/NM_0051 | AATCGCAGATGGAGGGACTCCTGACATAGCCAGCTGCTGTGAAATAATGGAAG | 161 |
| 92 | AGCTTACAACCTGCCTTAAAAATTACCGAAAAACCTTAATACACTGC | |
| NCR1/NM_00482 | GACGGGACTCCAGAAAGACCATGCCCTCTGGGATCACACTGCCCAGAATCTCC | 162 |
| 9 | TTCGGATGGGCCTGGCCTTTCTAGTCCTGGTGGCTCTAGTGTGGTTCCTGGTT | |
| | G | |
| FAS/NM_000043 | CAGTTGAGACTCAGAACTTGGAAGGCCTGCATCATGATGGCCAATTCTGCCAT | 163 |
| | AAGCCCTGTCCTCCAGGTGAAAGGAAAGCTAGGGACTGCACAGTCAATG | |
| GZMB/NM_00413 | GTGCGAATCTGACTTACGCCATTATTACGACAGTACCATTGAGTTGTGCGTGG | 164 |
| 1 | GGGACCCAGAGATTAAAAAGACTTCCTTTAAGGGGGACTCTGGAGGCCCTCTT | |
| | G | |
| IRF9/NM_00608 | CTTATCACAGTGAAGATGGAGCAGGCCTTTGCCCGATACTTGCTGGAGCAGAC | 165 |
| 4 | TCCAGAGCAGCAGGCAGCCATTCTGTCCCTGGTGTAGAGCCTGGGGGACC | |
| IFITM2/NM_006 | CGCCTACTCCGTGAAGTCTAGGGACAGGAAGATGGTTGGCGACGTGACCGGGG | 166 |
| 435 | CCCAGGCCTATGCCTCCACCGCCAAGTGCCTGAACATCTGGGCCCTGATTCTG | |
| TNFSF14/NM_00 | GAAGGGAAAGCTGGGGGCTCCCCACTGCACTTGCCACCTGAGTCACATTTTCA | 167 |
| 3807 | GAAGCCTCTGGAAAGTCGTGCACAGCCCAGGAGTGTTGAGCAATTTCGGTTTC | |
| | CTCT | |
| HLA- | CTGGAGAACGGGAAGGACAAGCTGGAGCGCGCTGACCCCCCAAAGACACACGT | 168 |
| B/NM_005514 | GACCCACCACCCCATCTCTGACCATGAGGCCACCCTGAGGTGCTGGGCCCTGG | |
| | G | |
| SDHA/NM_00416 | ACATCGGAACTGCGACTCAGCATGCAGAAGTCAATGCAAAATCATGCTGCCGT | 169 |
| 8 | GTTCCGTGTGGGAAGCGTGTTGCAAGAAGGTTGTGGGAAAATCAGC | |
| NRP1/NM_00387 | TCCTACCGAGAGTGGATACAGGTAGACTTGGGCCTTCTGCGCTTTGTCACGGC | 170 |
| 3 | TGTCGGGACACAGGGCGCCATTTCAAAAGAAACCAAGAAGAAATATTATGTC | |
| EBI3/NM_00575 | GCTGCGCGCTTCCACCGGGTGGGGCCCATTGAAGCCACGTCCTTCATCCTCAG | 171 |
| 5 | GGCTGTGCGGCCCCGAGCCAGGTACTACGTCCAAGTGGCGGCTCAGGACCTCA | |
| | GAG | |
| EFNA4/NM_0052 | GGAGAGGAAGTCTGAGTCAGCCCATCCTGTTGGGAGCCCTGGAGAGAGTGGCA | 172 |
| 27 | CATCAGGGTGGCGAGGGGGGGACACTCCCAGCCCCCTCTGTCTCTTGC | |
| PVR/NM_006505 | CCTGCAAGGTGGAGCACGAGAGCTTTGAGAAGCCTCAGCTGCTGACTGTGAAC | 173 |
| | CTCACCGTGTACTACCCCCCAGAGGTATCCATCTCTGGCTATGATAACAACTG | |
| | G | |
| BUB1/NM_00433 | TATCTTCAGCTTGTGATAAAGAGTCAAATATGGAACGAAGAGTGATCACGATT | 174 |
| 6 | TCTAAATCAGAATATTCTGTGCACTCATCTTTGGCATCCAAAGTTGATG | |
| SKAP2/NM_0039 | ATGAATAACACTCTAAGAAAGGATGGAAAGAAAGATTGCTGTTTTGAAATCTC | 175 |
| 30 | TGCTCCTGATAAACGTATATATCAGTTTACAGCAGCTTCTCCCAAAGATG | |
| PRF1/NM_00504 | AGTTTCCATGTGGTACACACTCCCCCGCTGCACCCTGACTTCAAGAGGGCCCT | 176 |
| 1 | CGGGGACCTGCCCCACCACTTCAACGCCTCCACCCAGCCCGCCTACCTCAGGC | |
| CCL20/NM_0045 | TCCAAAACAGACTTGGGTGAAATATATTGTGCGTCTCCTCAGTAAAAAAGTCA | 177 |
| 91 | AGAACATGTAAAAACTGTGGCTTTTCTGGAATGGAATTGGACATAGCCCAAGA | |
| TNFRSF18/NM_0 | GACTGCATGTGTGTCCAGCCTGAATTCCACTGCGGAGACCCTTGCTGCACGAC | 178 |
| 04195 | CTGCCGGCACCACCCTTGTCCCCCAGGCCAGGGGGTACAGTCCCAGGGGAAAT | |
| | TC | |
| CTSS/NM_00407 | GAAAACCTATGGCAAACAATACAAGGAAAAGAATGAAGAAGCAGTACGACGTC | 179 |
| 9 | TCATCTGGGAAAAGAATCTAAAGTTTGTGATGCTTCACAACCTGGAGCATT | |
| NKG7/NM_00560 | CTCCTGGTCCTTCTACCTGGGCTGGGTCTCAGCTATCCTCTTGCTCTGTACAG | 180 |
| 1 | GTGCCCTGAGCCTGGGTGCTCACTGTGGCGGTCCCCGTCCTGGCTATGAAACC | |
| | T | |
| 1SGI5/NM_0051 | CAGGAGCTTGTGCCGTGGCCCACAGCCCACAGCCCACAGCCATGGGCTGGGAC | 181 |
| 01 | CTGACGGTGAAGATGCTGGCGGGCAACGAATTCCAGGTGTCCCTGAGCAGCTC | |
| | C | |
| PDCD1/NM_0050 | GACTCCCCAGACAGGCCCTGGAACCCCCCCACCTTCTCCCCAGCCCTGCTCGT | 182 |
| 18 | GGTGACCGAAGGGGACAACGCCACCTTCACCTGCAGCTTCTCCAACAC | |
| SNAI1/NM_0059 | TACAGCGAGCTGCAGGACTCTAATCCAGAGTTTACCTTCCAGCAGCCCTACGA | 183 |
| 85 | CCAGGCCCACCTGCTGGCAGCCATCCCACCTCCGGAGATCCTCAACCCCACCG | |
| | CC | |
| CXCL11/NM_005 | GTTGTTCAAGGCTTCCCCATGTTCAAAAGAGGACGCTGTCTTTGCATAGGCCC | 184 |
| 409 | TGGGGTAAAAGCAGTGAAAGTGGCAGATATTGAGAAAGCCTCCATAA | |
| CIITA/NM_0002 | GGACCTGGCTGGAGAAGAAGAGATTGAGCTCTACTCAGAACCCGACACAGACA | 185 |
| 46 | CCATCAACTGCGACCAGTTCAGCAGGCTGTTGTGTGACATGGAAGGTGAT | |
| IFI35/NM_0055 | TAGTTTCCAATTTGCGGATCCACTGCCCTCTGCTTGCGGGCTCTGCTCTGATC | 186 |
| 33 | ACCTTTGATGACCCCAAAGTGGCTGAGCAGGTGCTGCAACAAAAGGAGCACAC | |
| | G | |
| TNFSF9/NM_003 | GGCCCAAAATGTTCTGCTGATCGATGGGCCCCTGAGCTGGTACAGTGACCCAG | 187 |
| 811 | GCCTGGCAGGCGTGTCCCTGACGGGGGGCCTGAG | |
| TNFSF10/NM_00 | GCAGATGCAGGACAAGTACTCCAAAAGTGGCATTGCTTGTTTCTTAAAAGAAG | 188 |
| 3810 | ATGACAGTTATTGGGACCCCAATGACGAAGAGAGTATGAACAGCCCCTGCTGG | |
| MMP2/NM_00453 | TGAGAAGGATGGCAAGTACGGCTTCTGTCCCCATGAAGCCCTGTTCACCATGG | 189 |
| 0 | GCGGCAACGCTGAAGGACAGCCCTGCAAGTTTCCATTCCGCTTCCAGGGCACA | |
| | TC | |
| EGR3/NM_00443 | CCAACTGCCTGACAATCTGTACCCCGAGGAGATCCCCAGCGCGCTCAACCTCT | 190 |
| 0 | TCTCCGGCAGCAGCGACTCGGTAGTCCATTACAATCAGATGGCTACAGAGAA | |
| MAGEA1/NM_004 | CTGAGGGACGGCGTAGAGTTCGGCCGAAGGAACCTGACCCAGGCTCTGTGAGG | 191 |
| 988 | AGGCAAGGTTTTCAGGGGACAGGCCAACCCAGAGGACAGGATTCCCTGGAGGC | |
| | CACAG | |
| GDI63/NM_0042 | GTCCTTCAGAGCAAGTGGCCTCTGTAATCTGCTCAGGAAACCAGTCCCAAACA | 192 |
| 44 | CTGTCCTCGTGCAATTCATCGTCTTTGGGCCCAACAAGGCCTACCATTCC | |
| IL6/NM_000600 | AGTGAGGAACAAGCCAGAGCTGTGCAGATGAGTACAAAAGTCCTGATCCAGTT | 193 |
| | CCTGCAGAAAAAGGCAAAGAATCTAGATGCAATAACCACCCCTGACCCAACC | |
| KLRF1/NM_0165 | GAATATCTGGAACCGTGAATGGTATTCTCACTTTGACTTTGATCTCCTTGATC | 194 |
| 23 | CTGTTGGTTTCTCAGGGAGTATTGCTAAAATGCCAAAAAGGAAG | |
| B3GAT1/NM_018 | CCAGTTGGGCCGGACTCTCCAAACCTGCTTCCGCAATGGGTGGGTTGTGAGTG | 195 |
| 644 | CTGGTAATGAGGAGCCGTGGGTGCAGCCAGCCTTGGAGATGCCGAAGAGACGG | |
| | GACA | |
| C1QA/NM_01599 | ACAGGAGGCAGAGGCATCATGGAGGGTCCCCGGGGATGGCTGGTGCTCTGTGT | 196 |
| 1 | GCTGGCCATATCGCTGGCCTCTATGGTGACCGAGGACTTGTGCCGAGCACC | |
| OAS1/NM_01681 | AATTGTAAGAAGAAGCTTGGGAAGCTGCCACCTCAGTATGCCCTGGAGCTCCT | 197 |
| 6 | GACGGTCTATGCTTGGGAGCGAGGGAGCATGAAAACACATTTCAACACAGCCC | |
| | AG | |
| IKZF2/NM_0162 | GCCCAATGTGCTTATGGTACATAAAAGGAGTCACACTGGTGAACGCCCCTTCC | 198 |
| 60 | ACTGTAACCAGTGTGGAGCTTCTTTTACTCAGAAGGGCAACCTTCTGAG | |
| TLR9/NM_01744 | CCCCTGCCCCCCAGCATGGGTTTCTGCCGCAGCGCCCTGCACCCGCTGTCTCT | 199 |
| 2 | CCTGGTGCAGGCCATCATGCTGGCCATGACCCTGGCCCTGGGTACCTTGCCTG | |
| | CC | |
| KLF2/NM_01627 | CGCGGGCTGCGGCAAGACCTACACCAAGAGTTCGCATCTGAAGGCGCATCTGC | 200 |
| 0 | GCACGCACACAGGTGAGAAGCCCTACCACTGCAACTGGGACGGCTGCGGCTGG | |
| GUSB/NM_00018 | TTGCAGGGTTTCACCAGGATCCACCTCTGATGTTCACTGAAGAGTACCAGAAA | 201 |
| 1 | AGTCTGCTAGAGCAGTACCATCTGGGTCTGGATCAAAAACGCAGAAAATACG | |
| NFKBIA/NM_020 | GTCAATGCTCAGGAGCCCTGTAATGGCCGGACTGCCCTTCACCTCGCAGTGGA | 202 |
| 529 | CCTGCAAAATCCTGACCTGGTGTCACTCCTGTTGAAGTGTGGGGCTGATGTCA | |
| IL23A/NM_0165 | GAGATGGCTGTGACCCCCAAGGACTCAGGGACAACAGTCAGTTCTGCTTGCAA | 203 |
| 84 | AGGATCCACCAGGGTCTGATTTTTTATGAGAAGCTGCTAGGATCGGATATTT | |
| HERC6/NM_0179 | CTGTGTGTGAAATGAGTAAACAATCTTTGCAAGTCCTAAAGAAGTGTTGGGCA | 204 |
| 12 | TTTTTGCAAGAATCTTCTCTGAATCCGCTGATCCAGATGCTTAAAGCAGCC | |
| SLAMF8/NM_020 | ATGTGCTGCTGGTGGTGGTGCCTGTCTCGCTGCTCCTGATGCTGGTTACTCTC | 205 |
| 125 | TTCTCTGCCTGGCACTGGTGCCCCTGCTCAGGGAAAAAGAAAAAGGATGTCCA | |
| | TGC | |
| ILI5/NM_00058 | CACTGCCTTCGAAGTCCGGCGCCCCCCGGGAGGGAACTGGGTGGCCGCACCCT | 206 |
| 5 | CCCGGCTGCGGTGGCTGTCGCCCCCCACCCTGCAGCCAGGACTCGATGGAGAA | |
| TLR7/NM_01656 | CAACCAGACCTCTACATTCCATTTTGGAAGAAGACTAAAAATGGTGTTTCCAA | 207 |
| 2 | TGTGGACACTGAAGAGACAAATTCTTATCCTTTTTAACATAATCCTAATTTCC | |
| | A | |
| OAS2/NM_01681 | AATGCACTGGGTCAGCTGAGTTCTGGCTCCACACCCAGCCCCGAGGTTTATGC | 208 |
| 7 | AGGGCTCATTGATCTGTATAAATCCTCGGACCTCCCGGGAGGAGAGTTTTCTA | |
| | GCT | |
| HLA- | CAAAGAAGAACATGTGATCATCCAGGCCGAGTTCTATCTGAATCCTGACCAAT | 209 |
| DRA/NM_019111 | CAGGCGAGTTTATGTTTGACTTTGATGGTGATGAGATTTTCCATGTGGATATG | |
| | GC | |
| CRTAM/NM_0196 | GTAAGCACAAAGGAAGTGAAAGTGATTGTGCTGGCAACTCCTTTCAAGCCAAT | 210 |
| 04 | CCTGGAAGCTTCAGTTATCAGAAAGCAAAATGGAGAAGAACATGTTGTACTC | |
| MAGEC2/NM_016 | GCAGAGGAGGCCCAGGCAGTGCCAGGAGTCAAGGCCTGTTGGATCTCATCATC | 211 |
| 249 | CATATCCCTGTTGATACGTTTACCTGCTGCTCCTGAAGAAGTCGTCATGCCTC | |
| | CCG | |
| IGAM1/NM_0002 | GCCCTGATGGGCAGTCAACAGCTAAAACCTTCCTCACCGTGTACTGGACTCCA | 212 |
| 01 | GAACGGGTGGAACTGGCACCCCTCCCCTCTTGGCAGCCAGTGGGCAAGAACCT | |
| CD4/NM_000616 | CGCCTGTTTGAGAAGCAGCGGGCAAGAAAGACGCAAGCCCAGAGGCCCTGCCA | 213 |
| | TTTCTGTGGGCTCAGGTCCCTACTGGCTCAGGCCCCTGCCTCCCTCGGCAAGG | |
| | CC | |
| MAPK14/NM_139 | TTGCTCAGTACCACGATCCTGATGATGAACCAGTGGCCGATCCTTATGATCAG | 214 |
| 012 | TCCTTTGAAAGCAGGGACCTCCTTATAGATGAGTGGAAAAGCCTGACCTATGA | |
| | TG | |
| C1QB/NM_00049 | CCAGGAGGCGTCTGACACAGTATGATGATGAAGATCCCATGGGGCAGCATCCC | 215 |
| 1 | AGTACTGATGTTGCTCCTGCTCCTGGGCCTAATCG | |
| NOTCH3/NM_000 | CTGTGCCTGTCTTCCTGGGTTTGAGGGTCAGAATTGTGAAGTGAACGTGGACG | 216 |
| 435 | ACTGTCCAGGACACCGATGTCTCAATGGGGGGACATGCGTGGATGGCGTCAAC | |
| | ACC | |
| NCR3/NM_14713 | TCCCCTTCGCCAACTGGGACATCTTCCGACATGGCCTGGATGCTGTTGCTCAT | 217 |
| 0 | CTTGATCATGGTCCATCCAGGATCCTGTGCTCTCTGGGTGTCCCAGCCCCCTG | |
| | AG | |
| STAT3/NM_1392 | GGCCGAGGTCCTGAGCTGGCAGTTCTCCTCCACCACCAAGCGAGGACTGAGCA | 218 |
| 76 | TCGAGCAGCTGACTACACTGGCAGAGAAACTCTTGGGACCTGGTGTGAATTA | |
| TLR8/NM_13863 | CCATTCTGCGCTGCTGCAAGTTACGGAATGAAAAATTAGAACAACAGAAACAT | 219 |
| 6 | GGAAAACATGTTCCTTCAGTCGTCAATGCTGACCTGCATTTTCCTGCT | |
| CYBB/NM_00039 | TGCAGATCTGCTGCAACTGCTGGAGAGCCAGATGCAGGAAAGGAACAATGCCG | 220 |
| 7 | GCTTCCTCAGCTACAACATCTACCTCACTGGCTGGGATGAGTCTCAGGCCAAT | |
| | C | |
| IKZF4/NM_0224 | TAATGGAATCTTTATTTTGTGAAAGTAGCGGGGACTCATCTCTGGAGAAGGAG | 221 |
| 65 | TTCCTCGGGGCCCCAGTGGGGCCCTCGGTGAGCACCCCCAACAGCCAGCACTC | |
| IFIH1/NM_0221 | TGCCATTGCAGATGCAACCAGAGAAGATCCATTTAAAGAGAAACTTCTAGAAA | 222 |
| 68 | TAATGACAAGGATTCAAACTTATTGTCAAATGAGTCCAATGTCAGATTTTGGA | |
| LCK/NM_001042 | GGGGATCCCAGGATCTCACAATCTCAGGGACCATGGGCTGTGGCTGCAGCTCA | 223 |
| 771 | CACCCGGAAGATGACTGGATGGAAAACATCGATGTGTGTGAGAACTGCCA | |
| BCL2L11/NM_13 | CAAATCAACACAAACCCCAAGTCCTCCTTGCCAGGCCTTCAACCACTATCTCA | 224 |
| 8621 | GTGCAATGGCTTCCATGAGGCAGGCTGAACCTGCAGATATGCGCCCAGAGATA | |
| | TGG | |
| ITGAM/NM_0011 | GGAGCGCTTGCCCTCTCACTCCGACTTTCTGGCTGAGCTTCGGAAGGCCCCCG | 225 |
| 45808 | TGGTGAACTGCTCCATCGCTGTCTGCCAGAGAATCCAGTGTGACATCCCGTTC | |
| ITGB7/NM_0008 | GAGAAGGAGCAGCAACAACTCAACTGGAAGCAGGACAGTAATCCTCTCTACAA | 226 |
| 89 | AAGTGCCATCACGACCACCATCAATCCTCGCTTTCAAGAGGCAGACAGTCCCA | |
| | CTCT | |
| JCHAIN/NM_144 | AGTCAAGATGAAGAACCATTTGCTTTTCTGGGGAGTCCTGGCGGTTTTTATTA | 227 |
| 64 6 | AGGCTGTTCATGTGAAAGCCCAAGAAGATGAAAGGATTGTTCTTGTTGACA | |
| CD209/NM_0211 | GAAGTAACCGCTTCACCTGGATGGGACTTTCAGATCTAAATCAGGAAGGCACG | 228 |
| 55 | TGGCAATGGGTGGACGGCTCACCTCTGTTGCCCAGCTTCAAGCAGTATTGGAA | |
| | CAG | |
| SLAMF7/NM_021 | ATACGGTTTACTCCACTGTGGAAATACCGAAAAAGATGGAAAATCCCCACTCA | 229 |
| 181 | CTGCTCACGATGCCAGACACACCAAGGCTATTTGCCTATGAGAATGTTATC | |
| IL10/NM_00057 | GCCTTTAATAAGCTCCAAGAGAAAGGCATCTACAAAGCCATGAGTGAGTTTGA | 230 |
| 2 | CATCTTCATCAACTACATAGAAGCCTACATGACAATGAAGATACGAAACTGAG | |
| | A | |
| IL1A/NM_00057 | GAAGCAGTGAAATTTGACATGGGTGCTTATAAGTCATCAAAGGATGATGCTAA | 231 |
| 5 | AATTACCGTGATTCTAAGAATCTCAAAAACTCAATTGTATGTGACTGCCC | |
| FCGR3A/NM_000 | CCCTCAGTGACCCGGTGCAGCTAGAAGTCCATATCGGCTGGCTGTTGCTCCAG | 232 |
| 569 | GCCCCTCGGTGGGTGTTCAAGGAGGAAGACCCTATTCACCTGAGGTGTCACAG | |
| | CTGGAAGAACACTGCTCTGCATAAGGTCACATATTTACAGAATGGCAAAGGCA | |
| | GGAAGTATTTTCATCATAATTCTGACTTCTACATTCCAAAAGCCACACTCAAA | |
| | GACAGCGGCTCCTACTTCTGCAGGGGGCTTTTTGGGAGTAAAAATGTGTCTTC | |
| | AGAGACTGTGAACATCACCATCACTCAAGGTTTGGCAGTGTCAACCATCTCA | |
| IFNA17/NM_021 | CAAAGACTCACTTCTATAACCACCACGAGTTGAATCAAAATTTTCAAATGTTT | 233 |
| 268 | TCAGCAGTGTAAAGAAGCGTCGTGTATACCTGTGCAGGCACTAG | |
| EGR2/NM_00039 | CCCAATGCCGAACTGGGAGGCCCCTTTGACCAGATGAACGGAGTGGCCGGAGA | 234 |
| 9 | TGGCATGATCAACATTGACATGACTGGAGAGAAGAGGTCGTTGGATCTCCCA | |
| TOP2A/NM_0010 | CCAACTTTGATGTGCGTGAAATTGTAAATAACATCAGGCGTTTGATGGATGGA | 235 |
| 67 | GAAGAACCTTTGCCAATGCTTCCAAGTTACAAGAACTTCAAGGGTACTAT | |
| C10orf54/NM_0 | GCGGCCTCTACTGCTGCCTGGTGGTGGAGATCAGGCACCACCACTCGGAGCAC | 236 |
| 22153 | AGGGTCCATGGTGCCATGGAGCTGCAGGTGCAGACAGGCAAAGATGCACCATC | |
| | CAAC | |
| FOXM1/NM_0219 | CTTTGAAAGACATCTATACGTGGATTGAGGACCACTTTCCCTACTTTAAGCAC | 237 |
| 53 | ATTGCCAAGCCAGGCTGGAAGAACTCCATCCGCCACAACCTTTCCCTGCACGA | |
| | CATGT | |
| AXL/NM_021913 | TCGCCTGAAGCAGCCTGCGGACTGTCTGGATGGACTGTATGCCTTGATGTCGC | 238 |
| | GGTGCTGGGAGCTAAATCCCCAGGACCGGCCAAGTTTTACAGAGCTGCGGGAA | |
| | GAT | |
| MS4A1/NM_0219 | GGAGACTCAGGAGTTTTGAGAGCAAAATGACAACACCCAGAAATTCAGTAAAT | 239 |
| 50 | GGGACTTTCCCGGCAGAGCCAATGAAAGGCCCTATTGCTATGCAATCTGGTC | |
| IF16/NM_02287 | CAGCAGGCTCCGGGCTGAAGATTGCTTCTCTTCTCTCCTCCAAGGTCTAGTGA | 240 |
| 3 | CGGAGCCCGCGCGCGGCGCCACCATGCGGCAGAAGGCGGTATCGCTTTTCTTG | |
| | TGC | |
| CD3D/NM_00073 | TCATTATCGAATGTGCCAGAGCTGTGTGGAGCTGGATCCAGCCACCGTGGCTG | 241 |
| 2 | GCATCATTGTCACTGATGTCATTGCCACTCTGCTCCTTGCTTTGGGAGTC | |
| GPR18/NM_0010 | ATGCTCATCTCTCACACAGACTTTTGATGGACAGGAGTTTCTAAGTATCATGC | 242 |
| 98200 | CTACCAACAAGCTGTAAAATGATCACCCTGAACAATCAAGATCAACCTG | |
| CD3G/NM_00007 | GAGGAGGAATTGAACTCAGGACTCAGAGTAGTCCAGGTGTTCTCCTCCTATTC | 243 |
| 3 | AGTTCCCAGAATCAAAGCAATGCATTTTGGAAAGCTCCTAGCAGAGAG | |
| ZAP70/NM_0010 | CGGCCCACGAGCGGATGCCCTGGTACCACAGCAGCCTGACGCGTGAGGAGGCC | 244 |
| 79 | GAGCGCAAACTTTACTCTGGGGCGCAGACCGACGGCAAGTTCCTGCTGAGGCC | |
| | GC | |
| HMBS/NM_00019 | GCTGTGGGCCAGGGGGCCTTGGGCGTGGAAGTGCGAGCCAAGGACCAGGACAT | 245 |
| 0 | CTTGGATCTGGTGGGTGTGCTGCACGATCCCGAGACTCTGCTTCGCTGCATCG | |
| | CT | |
| IL7/NM_000880 | GAGCTTGCTCCTGCTCCAGTTGCGGTCATCATGACTACGCCCGCCTCCCGCAG | 246 |
| | ACCATGTTCCATGTTTCTTTTAGGTATATCTTTGGACTTCCTCCCCTGATCCT | |
| | T | |
| IFIT3/NM_0010 | GGAATCAGTAAGCTAAAAACAAAATCAACCGGGACCCCAGCTTTTCAGAACTG | 247 |
| 31683 | CAGGGAAACAGCCATCATGAGTGAGGTCACCAAGAATTCCCTGGAGAAA | |
| RB1/NM_000321 | AAACAAATATTTTGCAGTATGCTTCCACCAGGCCCCCTACCTTGTCACCAATA | 248 |
| | CCTCACATTCCTCGAAGCCCTTACAAGTTTCCTAGTTCACCCTTACGG | |
| PTGS2/NM_0009 | AGTCTTTTAATGAGTACCGCAAACGCTTTATGCTGAAGCCCTATGAATCATTT | 249 |
| 63 | GAAGAACTTACAGGAGAAAAGGAAATGTCTGCAGAGTTGGAAGCACTCTATGG | |
| | T | |
| TGFB1/NM_0006 | AAAGTGGAGCAGCACGTGGAGCTGTACCAGAAATACAGCAACAATTCCTGGCG | 250 |
| 60 | ATACCTCAGCAACCGGCTGCTGGCACCCAGCGACTCGCCAGAGTGGTTATCTT | |
| NCF1/NM_00026 | GTACCGCGACAGACATCACCGGCCCCATCATCCTGCAGACGTACCGCGCCATT | 251 |
| 5 | GCCAACTACGAGAAGACCTCGGGCTCCGAGATGGCTCTGTCCACGGGGGACGT | |
| | GG | |
| TWIST1/NM_000 | GGGGGCCTGGTCCATGTCCGCGTCCCACTAGCAGGCGGAGCCCCCCACCCCCT | 252 |
| 474 | CAGCAGGGCCGGAGACCTAGATGTCATTGTTTCCAGAGAAGGAGAAAATGG | |
| CA4/NM_000717 | CCAGGCCAAACAGTTGCACCTGCACTGGTCCGACTTGCCATATAAGGGCTCGG | 253 |
| | AGCACAGCCTCGATGGGGAGCACTTTGCCATGGAGATGCACATAGTACATGAG | |
| | AAAG | |
| SELL/NM_00065 | ACCCTTGTGCTAAGTCAAGAGGCTCAATGGGCTGCAGAAGAACTAGAGAAGGA | 254 |
| 5 | CCAAGCAAAGCCATGATATTTCCATGGAAATGTCAGAGCACCCAGAGGGACTT | |
| LILRB1/NM_001 | GGCCGTCATCCTACTGCTCCTCCTCCTCCTCCTCCTCTTCCTCATCCTCCGAC | 255 |
| 081637 | ATCGACGTCAGGGCAAACACTGGACATCGACCCAGAGAAAGGCTG | |
| GDI4/NM_00059 | GCACTTCCAGAGCCTGTCCGGAGCTCAGAGGTTCGGAAGACTTATCGACCATG | 256 |
| 1 | GAGCGCGCGTCCTGCTTGTTGCTGCTGCTGCTGCCGCTGGTGCACGTCTCTGC | |
| ALOX15B/NM_00 | CACCCTGCACATCAACACACTCGCCCGGGAGCTGCTTATCGTGCCAGGGCAGG | 257 |
| 1141 | TGGTGGACAGGTCCACAGGCATCGGCATTGAAGGCTTCTCTGAGTTGATACAG | |
| PECAM1/NM_000 | TCCAGCCATGGCTGCCATTACCTGACCAGCGCCACAGCCGGTCTCTCTGCAGG | 258 |
| 442 | CGCCGGGAGAAGTGACCAGAGCAATTTCTGCTTTTCACAGGGCGGGTTTCTCA | |
| | ACGG | |
| NOS2/NM_00062 | GGGACTGGGCAGTTCTAGACAGTCCCGAAGTTCTCAAGGCACAGGTCTCTTCC | 259 |
| 5 | TGGTTTGACTGTCCTTACCCCGGGGAGGCAGTGCAGCCAGCTGCAAGCCCC | |
| FASLG/NM_0006 | TTTCATGGTTCTGGTTGCCTTGGTAGGATTGGGCCTGGGGATGTTTCAGCTCT | 260 |
| 39 | TCCACCTACAGAAGGAGCTGGCAGAACTCCGAGAGTCTACCAGCCAGATGC | |
| CD44/NM_00061 | CTTTTACACCTTTTCTACTGTACACCCCATCCCAGACGAAGACAGTCCCTGGA | 261 |
| 0 | TCACCGACAGCACAGACAGAATCCCTGCTACCACTTTGATGAGCACTAGTGCT | |
| | AC | |
| ENTPD1/NM_001 | TGGCCAAGAGGAAGGTGCCTATGGCTGGATTACTATCAACTATCTGCTGGGCA | 262 |
| 098175 | AATTCAGTCAGAAAACAAGGTGGTTCAGCATAGTCCCATATGAAACCAATAAT | |
| | C | |
| CMKLR1/NM_001 | GGAGACATGGAGGAGGAAGAGGCTGAGGGGAAGATGGAAGAAGGAGGGAAGGA | 263 |
| 142345 | AGGAGAAATCTTTGCTTTTGGGTAATCAGGTGTTTCTAGCTGTGTACAGGGAC | |
| | T | |
| CD53/NM_00104 | GGTCTTGAAGGACACTGGGATCCTGTAACACAGCCCCGGATATCTGTGTTACC | 264 |
| 0033 | AGCCTTGTCTCGGCCACCTCAAGGATAATCACTAAATTCTGCCGAAAGGACT | |
| TNF/NM_000594 | TGTAGCAAACCCTCAAGCTGAGGGGCAGCTCCAGTGGCTGAACCGCCGGGCCA | 265 |
| | ATGCCCTCCTGGCCAATGGCGTGGAGCTGAGAGATAACCAGCTGGTGGTGCC | |
| CXCL8/NM_0005 | TTCTGCAGCTCTGTGTGAAGGTGCAGTTTTGCCAAGGAGTGCTAAAGAACTTA | 266 |
| 84 | GATGTCAGTGCATAAAGACATACTCCAAACCTTTCCACCCCAAATTTATCAA | |
| CD40LG/NM_000 | TGTGTTACAGTGGGCTGAAAAAGGATACTACACCATGAGCAACAACTTGGTAA | 267 |
| 074 | CCCTGGAAAATGGGAAACAGCTGACCGTTAAAAGACAAGGACTCTAT | |
| HLA- | TCCCAGACGCGGAGGTTGGGGTCATGGCGCCCCGAAGCCTCCTCCTGCTGCTC | 268 |
| F/NM_00109847 | TCAGGGGCCCTGGCCCTGACCGATACTTGGGCGGGCTCCCACTCCTTGAG | |
| 9 | | |
| GATA3/NM_0010 | CTGTGCAACGCCTGCGGGCTCTATCACAAAATGAACGGACAGAACCGGCCCCT | 269 |
| 02295 | CATTAAGCCCAAGCGAAGGCTGTCTGCAGCCAGGAGAGCAGGGACGTCCTGTG | |
| | CG | |
| LYZ/NM_000239 | AAGGTGTGAGTTGGCCAGAACTCTGAAAAGATTGGGAATGGATGGCTACAGGG | 270 |
| | GAATCAGCCTAGCAAACTGGATGTGTTTGGCCAAATGGGAGAGTGGTTA | |
| ARG1/NM_00004 | AAAGGCTGGTCTGCTTGAGAAACTTAAAGAACAAGAGTGTGATGTGAAGGATT | 271 |
| 5 | ATGGGGACCTGCCCTTTGCTGACATCCCTAATGACAGTCCCTTTCAAATTG | |
| IL2RB/NM_0008 | CCCAGCTGAGCTCAGAGCATGGAGGAGACGTCCAGAAGTGGCTCTCTTCGCCC | 272 |
| 78 | TTCCCCTCATCGTCCTTCAGCCCTGGCGGCCTGGCACCTGAGATCTCGCCACT | |
| | AG | |
| NECTIN2/NM_00 | TGCCGTGGGCATGGGCCGCGCTGAGCAGGTCATCTTTGTCCGAGAGACCCCCA | 273 |
| 1042724 | ACACAGCAGGCGCAGGGGCCACAGGCGGCATCATCGGGGGCATCATCGCCGCC | |
| | AT | |
| MPO/NM_000250 | GCCCGGAAGATCGTGGGGGCCATGGTCCAGATCATCACTTACCGGGACTACCT | 274 |
| | GCCCCTGGTGCTGGGGCCAACGGCCATGAGGAAGTACCTGCCCACGTACCGTT | |
| | CC | |
| CCR2/NM_00112 | TGCTGAGAAGCCTGACATACCAGGACTGCCTGAGACAAGCCACAAGCTGAACA | 275 |
| 3396 | GAGAAAGTGGATTGAACAAGGACGCATTTCCCCAGTACATCCACA | |
| BRCA2/NM_0000 | CTGTACTTCAGGGCCGTACACTGCTCAAATCATTCCTGGTACAGGAAACAAGC | 276 |
| 59 | TTCTGATGTCTTCTCCTAATTGTGAGATATATTATCAAAGTCCTTTATCACT | |
| ADORA2A/NM_00 | GCCATCCGCATCCCGCTCCGGTACAATGGCTTGGTGACCGGCACGAGGGCTAA | 277 |
| 0675 | GGGCATCATTGCCATCTGCTGGGTGCTGTCGTTTGCCATCGGCCTGACT | |
| G6PD/NM_00040 | GACGTCCGTGATGAGAAGGTCAAGGTGTTGAAATGCATCTCAGAGGTGCAGGC | 278 |
| 2 | CAACAATGTGGTCCTGGGCCAGTACGTGGGGAACCCCGATGGAGAGGGCGAGG | |
| | CCAC | |
| TAP1/NM_00059 | CTGGACCACTAGTATTTCAGGTATGCTGCTGAAAGTGGGAATCCTCTACATTG | 279 |
| 3 | GTGGGCAGCTGGTGACCAGTGGGGCTGTAAGCAGTGGGAACCTTGTCACATT | |
| MX1/NM_001178 | CGAAGTGGACATCGCAAAAGCTGATCCAGCTGCTGCATCCCACCCTCTATTAC | 280 |
| 046 | TGAATGGAGATGCTACTGTGGCCCAGAAAAATCCAGGCTCGGTGGCTGAGA | |
| HLA- | GCTGAGCACCCCAGTGGCTGAGGCCAGAGACTTTCCCAAGGATTTCTTGGTCC | 281 |
| DQB2/NM_00119 | AGTTTAAGGGCATGTGCTACTTCACCAACGGGACAGAGCGCGTGCGCG | |
| 8858 | | |
| CD27/NM_00124 | CCGGGGGTCTCCTTCTCTCCTGACCACCACACCCGGCCCCACTGTGAGAGCTG | 282 |
| 2 | TCGGCACTGTAACTCTGGTCTTCTCGTTCGCAACTGCACCATCACTGCCAATG | |
| | CT | |
| CD276/NM_0010 | CATCCCTGAGGCTGCAGCGCGTGCGTGTGGCGGACGAGGGCAGCTTCACCTGC | 283 |
| 24736 | TTCGTGAGCATCCGGGATTTCGGCAGCGCTGCCGTCAGCCTGCAGGTGGCCGC | |
| | TCC | |
| STAT4/NM_0031 | GGGACTGTGAGGGGCGCTTCTGACTTTGGACTTGAGCACTGCCTGGGACCTGT | 284 |
| 51 | GCTGAGAGAGCGCTAGCATGTCTCAGTGGAATCAAGTCCAACAGTTAGAAATC | |
| | A | |
| PTPN7/NM_0011 | TCTGCGCACTGCTGGACACCCCCTTACCCGCTGGGCCCTTCAGCGCCAGCCAC | 285 |
| 99797 | CCAGCCCCAAGCAACTGGAAGAAGAATTCTTGAAGATCCCTTCAAACTTTGTC | |
| | AGCC | |
| PTPRC/NM_0028 | GACAACCACCCTCAGCCTTGCACACCACAGCTCTGCTGCCTTACCTGCACGCA | 286 |
| 38 | CCTCCAACACCACCATCACAGCGAACACCTCAGATGCCTACCTTAATGCCTCT | |
| | G | |
| PSMB9/NM_0028 | ATCAGCTATAAATATCGAGAGGACTTGTCTGCACATCTCATGGTAGCTGGCTG | 287 |
| 00 | GGACCAACGTGAAGGAGGTCAGGTATATGGAACCCTGGGAGGAATGCTGACTC | |
| | G | |
| CD244/NM_0011 | CTCAGGACTGTCAGAATGCCCATCAGGAATTCAGATTTTGGCCGTTTTTGGTG | 288 |
| 66663 | ATCATCGTGATTCTAAGCGCACTGTTCCTTGGCACCCTTGCCTGCTTCTGTG | |
| CXCR4/NM_0034 | GGGGATCAGTATATACACTTCAGATAACTACACCGAGGAAATGGGCTCAGGGG | 289 |
| 67 | ACTATGACTCCATGAAGGAACCCTGTTTCCGTGAAGAAAATGCTAATTTCAAT | |
| | AA | |
| MAPK1/NM_0027 | TTTGTCAGGACAAGGGCTCAGAGGACTGGACGTGCTCAGACATCGGTGTTCTT | 290 |
| 45 | CTTCCCAGTTCTTGACCCCTGGTCCTGTCTCCAGCCCGTCTTGGCTTA | |
| TP63/NM_00372 | ATCCAGCGTTTCGTAGAAACCCCAGCTCATTTCTCTTGGAAAGAAAGTTATTA | 291 |
| 2 | CCGATCCACCATGTCCCAGAGCACACAGACAAATGAATTCCTCAGTCCAG | |
| IRF4/NM_00246 | TATGCTTGTGCCCCACCTGAGTCCCAGGCTCCCGGAGTCCCCACAGAGCCAAG | 292 |
| 0 | CATAAGGTCTGCCGAAGCCTTGGCGTTCTCAGACTGCCGGCTGCACATCTGCC | |
| | TGT | |
| CCL3/NM_00298 | TCATAGCTGACTACTTTGAGACGAGCAGCCAGTGCTCCAAGCCCGGTGTCATC | 293 |
| 3 | TTCCTAACCAAGCGAAGCCGGCAGGTCTGTGCTGACCCCAGTGAGGAGTGGG | |
| CCL18/NM_0029 | TATTCTGAAACCAGCCCCCAGTGCCCCAAGCCAGGTGTCATCCTCCTAACCAA | 294 |
| 88 | GAGAGGCCGGCAGATCTGTGCTGACCCCAATAAGAAGTGGGTCCA | |
| IL7R/NM_00218 | TTAATACATCACACTTGCAAAAGAAGTATGTAAAAGTTTTAATGCACGATGTA | 295 |
| 5 | GCTTACCGCCAGGAAAAGGATGAAAACAAATGGACGCATGTGAATTTATCCAG | |
| | C | |
| HLA- | ACAGGATTCCTGAGCTGAAATGCAGATGACCACATTCAAGGAAGAACTTTCTG | 296 |
| DRB1/NM_00212 | CCCCGGCTTTGCAGGATGAAAAGCTTTCCTGCTTGGCAGTTATTCTTCCACA | |
| 4 | | |
| CEACAM8/NM_00 | GTGAAATACAGAACCCAGCGAGTGCAAACTTCAGTGACCCAGTCACCCTGAAT | 297 |
| 1816 | GTCCTCTATGGCCCAGATGCCCCCACCATTTCCCCTTCAGACACCTATT | |
| CXCL10/NM_001 | AATTTACTGAAAGCAGTTAGCAAGGAAAGGTCTAAAAGATCTCCTTAAAACCA | 298 |
| 565 | GAGGGGAGCAAAATCGATGCAGTGCTTCCAAGGATGGACCACACAGAGGCTG | |
| CCL2/NM_00298 | GCAAGTGTCCCAAAGAAGCTGTGATCTTCAAGACCATTGTGGCCAAGGAGATC | 299 |
| 2 | TGTGCTGACCCCAAGCAGAAGTGGGTTCAGGATTCCATGGACCACCTGGAC | |
| SRGN/NM_00272 | TGCCTTGAAGAAAAAGGACCAATGTTCGAACTACTTCCAGGTGAATCCAACAA | 300 |
| 7 | GATCCCCCGTCTGAGGACTGACCTTTTTCCAAAGACGAGAATCCA | |
| CD19/NM_00117 | TGGGGGGCTTCTACCTGTGCCAGCCGGGGCCCCCCTCTGAGAAGGCCTGGCAG | 301 |
| 8098 | CCTGGCTGGACAGTCAATGTGGAGGGCAGCGGGGAGCTGTTCCGGTGGAATGT | |
| | TTCGGACCTAGGTGGCCTGGGCTGTGGCCTGAAGAACAGGTCCTCAGAGGGCC | |
| | CCAGCTCCCCTTCCGGGAAGCTCATGAGCCCCAAGCTGTATGTGTGGGCCAAA | |
| | GACCGCCCTGAGATCTGGGAGGGAGAGCCTCCGTGTCTCCCACCGAGGGACAG | |
| | CCTGAACCAGAGCCTCAGCCAGGACCTCACCATGGCCCCTGGCTCCACACTCT | |
| | GGCTGTCCTGTGGGGTACCCCCTGACTCTGTGTCCAGGGGCCCCCTCTCCTGG | |
| | ACCCATGTGCACCCCAAGGGGCCTAAGTCATTGCTGAGCCTAGAGCTGAAGGA | |
| | CGATCGCCCGGCCAGAGATATGTGGGTAATGGAGACGGGTCTGTTGTTGCCCC | |
| | GGGCCACAGCTCAAGACGCTGGAAAGTATTATTGTCACCGTGGCAACCTGACC | |
| | ATGTCATTCCACCTGGAGATCACTGCTCGGCCAGTACTATGGCACTGGCTGCT | |
| | GAGGACTGGTGGCTGGAAGGTCTCAGCTGTGACTTTGGCTTATCTGATCTTCT | |
| | GCCTGTGTTCCCTTGTGGGCATTCTTCATCTTCAAAGAGCCCTGGTCCTGAGG | |
| | AGGAAAAGAAAGCGAATGACTGACCCCACCAGGAGATTCTTCAAAGTGACGCC | |
| | TCCCCCAGGAAGCGGGCCCCAGAACCAGTACGGGAACGTGCTGTCTCTCCCCA | |
| | CACCCACCTCAGGCCTCGGACGCGCCCAGCGTTGGGCCGCAGGCCTGGGGGGC | |
| | ACTGCCCCGTCTTATGGAAACCCGAGCAGCGACGTCCAGGCGGATGGAGCCTT | |
| | GGGGTCCCGGAGCCCGCCGGGAGTGGGCCCAGAAGAAGAGGAAGGGGAGGGCT | |
| | ATGAGGAACCTGACAGTGAGGAGGACTCCG | |
| ITGB1/NM_0022 | CTCAATGAAAGACGATTTGGAGAATGTAAAAAGTCTTGGAACAGATCTGATGA | 302 |
| 11 | ATGAAATGAGGAGGATTACTTCGGACTTCAGAATTGGATTTGGCT | |
| IFITM1/NM_003 | CGTGAAGTCTAGGGACAGGAAGATGGTTGGCGACGTGACCGGGGCCCAGGCCT | 303 |
| 641 | ATGCCTCCACCGCCAAGTGCCTGAACATCTGGGCCCTGATTCTGGGC | |
| CCL21/NM_0029 | AAGGGCTCCAAAGGCTGCAAGAGGACTGAGCGGTCACAGACCCCTAAAGGGCC | 304 |
| 89 | ATAGCCCAGTGAGCAGCCTGGAGCCCTGGAGACCCCACCAGCCTCACCAGCGC | |
| | T | |
| MRC1/NM_00243 | GGAACCACAGACAATCTGTGCTCCAGAGGTTATGAAGCCATGTATACGCTACT | 305 |
| 8 | AGGCAATGCCAATGGAGCAACCTGTGCATTCCCGTTCAAGTTTGAAAACAAG | |
| PGF/NM_002632 | GCCCATCCTGTGTCTCCCTGCTGCGCTGCACCGGCTGCTGCGGCGATGAGAAT | 306 |
| | CTGCACTGTGTGCCGGTGGAGACGGCCAATGTCACCATGCAGCTCCT | |
| ITGAL/NM_0022 | CCAGAACACCTATCTGAGTGGCCTGTGTTACCTCTTCCGCCAGAATCTGCAGG | 307 |
| 09 | GTCCCATGCTGCAGGGGCGCCCTGGTTTTCAGGAATGTATCAAGGGCAAC | |
| ID2/NM_002166 | TGTGGCTGAATAAGCGGTGTTCATGATTTCTTTTATTCTTTGCACAACAACAA | 308 |
| | CAACAACAAATTCACGGAATCTTTTAAGTGCTGAACTTATTTTTCAA | |
| CD22/NM_00177 | CGTGGGCCCGGGAAGGTCGGAAGAAGTGTTCCTGCAAGTGCAGTATGCCCCGG | 309 |
| 1 | AACCTTCCACGGTTCAGATCCTCCACTCACCGGCTGTGGAGGGAAGTCAAGTC | |
| | G | |
| CCL17/NM_0029 | TCTGAGGACTGCTCCAGGGATGCCATCGTTTTTGTAACTGTGCAGGGCAGGGC | 310 |
| 87 | CATCTGTTCGGACCCCAACAACAAGAGAGTGAAGAATGCAGTTAAATACCTGC | |
| ITGAE/NM_0022 | ATATCTTTCAACAAATCTCTATATGAGGGACTGAATGCAGAGAACCACAGAAC | 311 |
| 08 | TAAGATCACTGTCGTCTTCCTGAAAGATGAGAAGTACCATTCTTTGCCTATCA | |
| IL3RA/NM_0021 | GACCTGGGACCTTAACAGAAATGTGACCGATATCGAGTGTGTTAAAGACGCCG | 312 |
| 83 | ACTATTCTATGCCGGCAGTGAACAATAGCTATTGCCAGTTTGGAGCA | |
| CCR7/NM_00183 | AGGTATGCCTGTGTCAAGATGAGGTCACGGACGATTACATCGGAGACAACACC | 313 |
| 8 | ACAGTGGACTACACTTTGTTCGAGTCTTTGTGCTCCAAGAAGGACGTGCGG | |
| CD1C/NM_00176 | TATGGTTTAAGAAGCACTGCTCATATCAGGACATCCTGTGAGACTCTTCCCCC | 314 |
| 5 | TGACTCCCCCATTGTGTTAAGAACCCAGCAACCCAGGAGCCTAGTACAATA | |
| MAD2L1/NM_002 | TCCCTGGCCATGGCGCTGCAGCTCTCCCGGGAGCAGGGAATCACCCTGCGCGG | 315 |
| 358 | GAGCGCCGAAATCGTGGCCGAGTTCTTCTCATTCGGCATCAACAGCATTTTAT | |
| PYGL/NM_00286 | GCAGCCTATGGATACGGCATTCGGTATGAATATGGGATTTTCAATCAGAAGAT | 316 |
| 3 | CCGAGATGGATGGCAGGTAGAAGAAGCAGATGATTGGCTCAGATATGGAAACC | |
| | CTTGG | |
| CD40/NM_00125 | CACACTGCCACCAGCACAAATACTGCGACCCCAACCTAGGGCTTCGGGTCCAG | 317 |
| 0 | CAGAAGGGCACCTCAGAAACAGACACCATCTGCACCTGTGAAGAAGGCTGGCA | |
| | C | |
| LY9/NM_002348 | ATCACCCCAACCTCACATGCACAGCCAGCAACCCTGTCAGCAGGAGTTCCCAC | 318 |
| | CAGTTTCTTTCTGAGAACATCTGTTCAGGACCTGAGAGAAACACAAAG | |
| HLA- | GCAGACCCTGCGCGGCTACTACAACCAGAGCGAGGCCAGTTCTCACACCCTCC | 319 |
| G/NM_002127 | AGTGGATGATTGGCTGCGACCTGGGGTCCGACGGACGCCTCCTCCGCGGGTAT | |
| | GAACAGTATGCCTACGATGGCAAGGATTACCTCGCCCTGAACGAGGACCTGCG | |
| | CTCCTGGACCGCAGCGGACACTGCGGCTCAGATCTCCAAGCGCAAGTGTGAGG | |
| | CGGCCAATGTGGCTGAACAAAGGAGAGCCTACCTGGAGGGCACGTGCGTGGAG | |
| | TGGCTCCACAGATACCTGGAGAACGGGAAGGAGATGCTGCAGCGCGCGGACCC | |
| | CCCCAAG | |
| TLR3/NM_00326 | TTGAACTAGAAGCAATTGTTAACAGCATCAAAAGAAGCAGAAAAATTATTTTT | 320 |
| 5 | GTTATAACACACCATCTATTAAAAGACCCATTATGCAAAAGATTCAAGG | |
| CD48/NM_00177 | GCAGCAAGAATGGCACGGTCTGCCTCAGTCCACCCTGTACCCTGGCCCGGTCC | 321 |
| 8 | TTTGGAGTAGAATGGATTGCAAGTTGGCTAGTGGTCACGGTGCCCACCAT | |
| STAT5A/NM_003 | GGAGTACCACCAAGCCACGGGCACCCTCAGTGCCCACTTCAGGAACATGTCAC | 322 |
| 152 | TGAAGAGGATCAAGCGTGCTGACCGGCGGGGTGCAGAGTCCGTGACAGAGG | |
| FCRLA/NM_0011 | CAAAAGGCAGACAGCGGGCACTACCACTGCAGTGGCATCTTCCAGAGCCCTGG | 323 |
| 84866 | TCCTGGGATCCCAGAAACAGCATCTGTTGTGGCTATCACAGTCCAAGAACTG | |
| BCL6/NM_00170 | CACTCTGGAGAGAAGCCCTACAAATGCGAAACCTGCGGAGCCAGATTTGTACA | 324 |
| 6 | GGTGGCCCACCTCCGTGCCCATGTGCTTATCCACACTGGTGAGAAGCCCTATC | |
| | C | |
| ZEB1/NM_00117 | CCCCAGGTGTAAGCGCAGAAAGCAGGCGAACCCGCGGCGCAATAACGTTACAA | 325 |
| 4093 | ATTATAATACTGTGGTAGAAACAAATTCAGATTCAGATGATGAAGACA | |
| CCL5/NM_00298 | ACTGCCCTCTGCGCTCCTGCATCTGCCTCCCCATATTCCTCGGACACCACACC | 326 |
| 5 | CTGCTGCTTTGCCTACATTGCCCGCCCACTGCCCCGTGCCCACATCAAGGAGT | |
| | ATT | |
| IDO1/NM_00216 | CTGGCCAGCTTCGAGAAAGAGTTGAGAAGTTAAACATGCTCAGCATTGATCAT | 327 |
| 4 | CTCACAGACCACAAGTCACAGCGCCTTGCACGTCTAGTTCTGGGATGC | |
| IL18/NM_00156 | CAGCTTCGGGAAGAGGAAAGGAACCTCAGACCTTCCAGATCGCTTCCTCTCGC | 328 |
| 2 | AACAAACTATTTGTCGCAGGAATAAAGATGGCTGCTGAACCAGTAGAAGACAA | |
| TNFRSF9/NM_00 | GTTGTTAAACGGGGCAGAAAGAAACTCCTGTATATATTCAAACAACCATTTAT | 329 |
| 1561 | GAGACCAGTACAAACTACTCAAGAGGAAGATGGCTGTAGCTGCCGATTTCC | |
| HIF1A/NM_0015 | GGTGGATATGTCTGGGTTGAAACTCAAGCAACTGTCATATATAACACCAAGAA | 330 |
| 30 | TTCTCAACCACAGTGCATTGTATGTGTGAATTACGTTGTGAGTGGTATT | |
| HLA- | GGTGCTGCTCACATCTGTGGTCCAGGGCAGGGCCACTCCAGAGAATTACCTTT | 331 |
| DPB1/NM_00212 | TCCAGGGACGGCAGGAATGCTACGCGTTTAATGGGACACAGCGCTTCCTGGA | |
| 1 | | |
| FOXO1/NM_0020 | AAGGATAAGGGTGACAGCAACAGCTCGGCGGGCTGGAAGAATTCAATTCGTCA | 332 |
| 15 | TAATCTGTCCCTACACAGCAAGTTCATTCGTGTGCAGAATGAAGGAACTGGA | |
| CD33/NM_00177 | CTTCTTTCGGATGGAGAGAGGAAGTACCAAATACAGTTACAAATCTCCCCAGC | 333 |
| 2 | TCTCTGTGCATGTGACAGACTTGACCCACAGGCCCAAAATCCTCATCCCTGGC | |
| S100A9/NM_002 | TCTGCAAAATTTTCTCAAGAAGGAGAATAAGAATGAAAAGGTCATAGAACACA | 334 |
| 965 | TCATGGAGGACCTGGACACAAATGCAGACAAGCAGCTGAGCTTCGAGGAGTTC | |
| HLA- | GGGGCTCCTGAGCCCATCCTTCGGGACTGGACACCTGGGCTGTCCCCCATGCA | 335 |
| DMB/NM_002118 | GACCCTGAAGGTTTCTGTGTCTGCAGTGACTCTGGGCCTGGGCCTCATCATCT | |
| | TC | |
| HLA- | ACACGGAATGTGAAGGCCCAGTCACAGACTGACCGAGTGGACCTGGGGACCCT | 336 |
| A/NM_002116 | GCGCGGCTACTACAACCAGAGCGAGGCCGGTTCTCACACCATCCAGA | |
| SNAI2/NM_0030 | TACCTTGTGTTTGCAAGATCTGCGGCAAGGCGTTTTCCAGACCCTGGTTGCTT | 337 |
| 68 | CAAGGACACATTAGAACTCACACGGGGGAGAAGCCTTTTTCTTGCCCTCACTG | |
| TNFRSF17/NM_0 | TATTTTGACAGTTTGTTGCATGCTTGCATACCTTGTCAACTTCGATGTTCTTC | 338 |
| 01192 | TAATACTCCTCCTCTAACATGTCAGCGTTATTGTAATGCAAGTGTGACCAAT | |
| LRP1/NM_00233 | GGCCCAATGGGCTAAGCCTGGACATCCCGGCTGGGCGCCTCTACTGGGTGGAT | 339 |
| 2 | GCCTTCTACGACCGCATCGAGACGATACTGCTCAATGGCACAGACCGGAAGAT | |
| MAGEA4/NM_001 | CGCAGCTTGAGACTGGCGGAGGGAAGCCCGCCCAGGCTCTATAAGGAGACAAG | 340 |
| 011548 | GTTCTGAGCAGACAGGCCAACCGGAGGACAGGATTCCCTGGAGGCCACAGAGG | |
| | AGCACCAAGGAGAAGATCTGCCTGTGGGTCCCCATTGCCCAGCTTTTGCCTGC | |
| | ACTCTTGCC | |
| HLA- | TTCCTCCCTTCTGCTGATGAGATTTATGACTGCAAGGTGGAGCACTGGGGCCT | 341 |
| DQA1/NM_00212 | GGACCAGCCTCTTCTGAAACACTGGGAGCCTGAGATTCCAGCCCCTATGTCAG | |
| 2 | AGCTCACAGAGACTGTGGTCTGTGCCCTGGGGTTGTCTGTGGGCCTCATGGGC | |
| | ATTGTGGTGGGCACTGTCTTCATCATCCAAGGCCTGCGTTCAGTTGGTGCTTC | |
| | CAGACACCAAGGGCCATTGTGAATCCCATCCTGGAAGGGAAGGTGCATCGCCA | |
| | TCTACAGGAGCAGAAGAATGGACTTGCTAAATGACCTAGCACTATTCTCTGGC | |
| | CCGATTTATCATATCCCTTTTCTCCTC | |
| CD1D/NM_00176 | GGCCTCCTTGAGTCAGGGAAGTCGGAACTGAAGAAGCAAGTGAAGCCCAAGGC | 342 |
| 6 | CTGGCTGTCCCGTGGCCCCAGTCCTGGCCCTGGCCGTCTGCTGCTGGTGTGCC | |
| | A | |
| RPS6/NM_00101 | ATGAGAAGCGTATGGCCACAGAAGTTGCTGCTGACGCTCTGGGTGAAGAATGG | 343 |
| 0 | AAGGGTTATGTGGTCCGAATCAGTGGTGGGAACGACAAACAAGGTTTCCCCA | |
| MKI67/NM_0024 | CTCTTCTGACCCTGATGAGAAAGCTCAAGATTCCAAGGCCTATTCAAAAATCA | 344 |
| 17 | CTGAAGGAAAAGTTTCAGGAAATCCTCAGGTACATATCAAGAATGTCAAAGA | |
| GZMK/NM_00210 | GTATGGCGGACATCACGTTTGTGGAGGTGTTCTGATTGATCCACAGTGGGTGC | 345 |
| 4 | TGACAGCAGCCCACTGCCAATATCGGTTTACCAAAGGCCAGTCTCCCACTGTG | |
| | GT | |
| CD79A/NM_0017 | GATGCCTGGGGGTCCAGGAGTCCTCCAAGCTCTGCCTGCCACCATCTTCCTCC | 346 |
| 83 | TCTTCCTGCTGTCTGCTGTCTACCTGGGCCCTGGGTGCCAGGCCCTGTGGATG | |
| CD37/NM_00177 | ACCATCCAAAAGTACGGCACCAACCCCGAGGAGACCGCGGCCGAGGAGAGCTG | 347 |
| 4 | GGACTATGTGCAGTTCCAGCTGCGCTGCTGCGGCTGGCACTACCCGCAGGACT | |
| | GGT | |
| FUT4/NM_00203 | GCAGTGGTATAGCATATCCTCACATTTCTAGTGCCCTTGAGACTGTGCTATGG | 348 |
| 3 | AACCAATCTTGAACATACATGCATTGACTTGACAAGTTACTGAGTAAGCAGCA | |
| | TA | |
| AIF1/NM_00162 | TGACTTTCTCAGGATGATGCTGGGCAAGAGATCTGCCATCCTAAAAATGATCC | 349 |
| 3 | TGATGTATGAGGAAAAAGCGAGAGAAAAGGAAAAGCCAACAGGCCCCCCAGCC | |
| CCR1/NM_00129 | ACCAGAGAGAAGCCGGGATGGAAACTCCAAACACCACAGAGGACTATGACACG | 350 |
| 5 | ACCACAGAGTTTGACTATGGGGATGCAACTCCGTGCCAGAAG | |
| PRDM1/NM_0011 | CAAGGAATCTGCTTTTCAAGTATGCCACCAACAGTGAAGAGGTTATTGGAGTG | 351 |
| 98 | ATGAGTAAAGAATACATACCAAAGGGCACACGTTTTGGACCCCTAATAGGT | |
| CD47/NM_00177 | CTACAGGGATATTAATATTACTTCACTACTATGTGTTTAGTACAGCGATTGGA | 352 |
| 7 | TTAACCTCCTTCGTCATTGCCATATTGGTTATTCAGGTGATAGCCTATATCC | |
| CD74/NM_00102 | AAGCCCACTGACGCTCCACCGAAAGTACTGACCAAGTGCCAGGAAGAGGTCAG | 353 |
| 5159 | CCACATCCCTGCTGTCCACCCGGGTTCATTCAGGCCCAAGTGCGACGAGAACG | |
| | GCA | |
| LAG3/NM_00228 | GGATGTGAGCCAGGCCCAGGCTGGGACCTACACCTGCCATATCCATCTGCAGG | 354 |
| 6 | AACAGCAGCTCAATGCCACTGTCACATTGGCAATCATCACAGTGACTCCCAAA | |
| | TC | |
| TNFRSF4/NM_00 | CCTCAGAAGTGGGAGTGAGCGGAAGCAGCTGTGCACGGCCACACAGGACACAG | 355 |
| 3327 | TCTGCCGCTGCCGGGCGGGCACCCAGCCCCTG | |
| CD2/NM_001767 | TCAATATATGATACAAAAGGAAAAAATGTGTTGGAAAAAATATTTGATTTGAA | 356 |
| | GATTCAAGAGAGGGTCTCAAAACCAAAGATCTCCTGGACTTGTATCAAC | |
| CCL4/NM_00298 | GCTGCCTTCTGCTCTCCAGCGCTCTCAGCACCAATGGGCTCAGACCCTCCCAC | 357 |
| 4 | CGCCTGCTGCTTTTCTTACACTGCGAGGAAGCTTCCTCGCAACTTT | |
| BAGE/NM_18248 | GGCCTGAGCGGTAGGAGTGGGGCTGGAGCAGTAAGATGGCGGCCAGAGCGGTT | 358 |
| 2 | TTTCTGGCATTGTCTGCCCAGCTGCTCCAAGCCAGGCTGATGAAGGAGGAGTC | |
| | CCCTGTGGTGA | |
| LEXM/NM_00111 | CTCCAAGGGGTCAGGTGCAAAGGCCTGCCAGATGATTATGGGAAGCTGGAACC | 359 |
| 0533 | CAGTAGGTGTGGGCCGCTACCTCAACACCTGGCTGATGGAGACAAAGG | |
| CCR6/NM_00436 | TTTCTACAACCAGCTTGCATTTTTTCTGCCCACAATGAGCGGGGAATCAATGA | 360 |
| 7 | ATTTCAGCGATGTTTTCGACTCCAGTGAAGATTATTTTG | |
| CD70/NM_00125 | GCATCCAGCGCTTCGCACAGGCTCAGCAGCAGCTGCCGCTCGAGTCACTTGGG | 361 |
| 2 | TGGGACGTAGCTGAGCTGCAGCTGAATCACACAGGACCTCAGCAGGACCCC | |
| CDK1/NM_00178 | GGTGACTGATGATCTAAGTTTCCCGAGGTTTCTCAGAGCCTCTCTGGTTCTTT | 362 |
| 6 | CACTGGTGACCAGCCAGCCCCTCCTCTTTCTTCCTCCGGTGCTGGCGGAAGAG | |
| | CCCCC | |
| CTAG1B/NM_001 | GCTGCAGATGCGGGGCCAGGGGGCCGGAGAGCCGCCTGCTTGAGTTCTACCTC | 363 |
| 327 | GCCATGCCTTTCGCGACACCCATGGAAGCAGAGCTGGCCCGCAGGAGCCTGGC | |
| | CCAGGATGCCCCACCGCTTCCCGTGCCAGGGGTGCTTCTGAAGGAGTTCACTG | |
| | TGTCCGGCAACATACTGACTATCCGACTGACTGCTGCAGACCACCGCCAACTG | |
| | CAGCTCTCCATCAGCTCCTGTCTCCAGCAGCTTTC | |
| CTAG2/NM_0209 | CTCTCCCCCGACCAGGGGCGGTTCTGAAGGACTTCACCGTGTCCGGCAACCTA | 364 |
| 94 | CTGTTTATGTCAGTTCGGGACCAGGACAGGGAAGGCGCTGGGCGGATGAGGGT | |
| | GGTGGGTTGGGGGCTGGGATCCGCCTCCCCGGAGGGGCAGAAAGCTAGAGATC | |
| | TCAGAACACCCAAACACAAGGTCTCAGAACAGAGACCTGGTACACCAGGCCCG | |
| | CCGCCACCCGAGGGAGCCCAGGGAGATGGGTGCAGAGGTGTCGCCTTTAATGT | |
| | GATGTTCTCTGCCCCTCACATTTAGCCGACTGACTGCTGCAGACCACCGCCAA | |
| | CTGCAGCTCTCCATCAGCTCCTGTCTCCAGCAGCTTTC | |
| CX3CR1/NM_001 | GCTGACTGCAGGGCCTGCTCCCTGCCCCCCACCTCCAGGTTGGGGCCTTCACC | 365 |
| 171174 | ATGGATCAGTTCCCTGAATCAGTGACAGAAAACTTTGAGTACGATGATTTGG | |
| CX3CR1/ENST00 | GTGGCTGACTGGCAGATCCAGAGGTTCCCTTGGCAGTCCACGCCAGGCCTTCA | 366 |
| 000541347 | CCATGGATCAGTTCCCTGAATCAGTGACAGAAAACTTTGAGTACGATGATTTG | |
| | G | |
| CX3CR1/ENST00 | GCGTTTAAGTTGGCAGACTTGGATTTCAGGAAGAGCTCTCTGGCTTCTGGGTG | 367 |
| 000435290 | GAGAATGGCCAGTGGGGCCTTCACCATGGATCAGTTCCCTGAATCAGTGACAG | |
| | AAAACTTTGAGTACGATGATTTGG | |
| CX3CR1/ENST00 | CTCGGAACACCACAGCGACTAGAGGCCTTCACCATGGATCAGTTCCCTGAATC | 368 |
| 000399220 | AGTGACAGAAAACTTTGAGTACGATGATTTGG | |
| GAGEI, GAGE12I, | ACCTATTATCGGCCTAGACCAAGACGCTACGTAGAGCCTCCTGAAATGATTGG | 369 |
| GAGE12F/NM_0 | GCCTATGCGGCCCGAGCAGTTCAGTGATGAAGTGGAACCAGCAACACCTGAAG | |
| 01040663 | AAGGGGAACC | |
| GAGE12J/NM_00 | ACCTATTATCGGCCTAGACCAAGACGCTACGTAGAGCCTCCTGAAATGATTGG | 370 |
| 1098406 | GCCTATGCGGCCCGAGCAGTTCAGTGATGAAGTGGAACCAGCAACACCTGAAG | |
| | AAGGGGAACC | |
| GAGE2C,GAGE2A, | ACCTATTATCGGCCTAGACCAAGACGCTACGTAGAGCCTCCTGAAATGATTGG | 371 |
| GAGE2E/NM_00 | GCCTATGCGGCCCGAGCAGTTCAGTGATGAAGTGGAACCAGCAACACCTGAAG | |
| 1472 | AAGGGGAACC | |
| GAGEI0/NM_001 | ACCTATTATCGGCCTAGACCAAGACGCTACGTAGAGCCTCCTGAAATGATTGG | 372 |
| 098413 | GCCTATGCGGCCCGAGCAGTTCAGTGATGAAGTGGAACCAGCAACACCTGAAG | |
| | AAGGGGAACC | |
| GAGE13/NM_001 | ACCTATTATCGGCCTAGACCAAGACGCTACGTAGAGCCTCCTGAAATGATTGG | 373 |
| 098412 | GCCTATGCGGCCCGAGCAGTTCAGTGATGAAGTGGAACCAGCAACACCTGAAG | |
| | AAGGGGAACC | |
| IKZF1/NM_0060 | GACATGTCCCAAGTTTCAGGGAAGGAAAGCCCCCCTGTAAGCGATACTCCAGA | 374 |
| 60 | TGAGGGCGATGAGCCCATGCCGATCCCCGAGGACCTCTCCACCACCTCGGGAG | |
| | GACAGC | |
| ILI7A/NM_0021 | CTCAGATTACTACAACCGATCCACCTCACCTTGGAATCTCCACCGCAATGAGG | 375 |
| 90 | ACCCTGAGAGATATCCCTCTGTGATCTGGGAGGC | |
| IL2/NM_000586 | CTTAATCAGCAATATCAACGTAATAGTTCTGGAACTAAAGGGATCTGAAACAA | 376 |
| | CATTCATGTGTGAATATGCTGATGAGACAGCA | |
| IL21/NM_02180 | CTTCCACAAATGCAGGGAGAAGACAGAAACACAGACTAACATGCCCTTCATGT | 377 |
| 3 | GATTCTTATGAGAAAAAACCACCCAAAGA | |
| IL22/NM_02052 | GACGTTCGTCTCATTGGGGAGAAACTGTTCCACGGAGTCAGTATGAGTGAGCG | 378 |
| 5 | CTGCTATCTGATGAAGCAGGTGCTGAACTTCAC | |
| KIR2DL2/ENST0 | CCATGTCGCTCATGGTCGTCAGCATGGCGTGTGTTGGGTTCTTCTTGCTGCAG | 379 |
| 0000344867 | GGGGCCTGGCCACATGAGGGAGTCCACAGAAAACCTTCCCTCCTGGCCCACCC | |
| | AGGTCCCCTGGTGAAATCAGAAGAGACAGTCATCCTGCAATGTTGGTCAGATG | |
| | TCAGGTTTGAGCACTTCCTTCTGCACAGAGAGGGGAAGTATAAGGACACTTTG | |
| | CACCTCATTGGAGAGCACCATGATGGGGTCTCCAAGGCCAACTTCTCCATCGG | |
| | TCCCATGATGCAAGACCTTGCAGGGACCTACAGATGCTACGGTTCTGTTACTC | |
| | ACTCCCCCTATCAGTTGTCAGCTCCCAGTGACCCTCTGGACATCGTCATCACA | |
| | GGTCTATATGAGAAACCTTCTCTCTCAGCCCAGCCGGGCCCCACGGTTTTGGC | |
| | AGGAGAGAGCGTGACCTTGTCCTGCAGCTCCCGGAGCTCCTATGACATGTACC | |
| | ATCTATCCAGGGAGGGGGAGGCCCATGAACGTAGGTTCTCTGCAGGGCCCAAG | |
| | GTCAACGGAACATTCCAGGCCGACTTTCCTCTGGGCCCTGCCACCCACGGAGG | |
| | AACCTACAGATGCTTCGGCTCTTTCCGTGACTCTCCCTATGAGTGGTCAAACT | |
| | CGAGTGACCCACTGCTTGTTTCTGTCACAGGAAACCCTTCAAATAGTTGGCCT | |
| | TCACCCACTGAACCAAGCTCCAAAACCGGTAAC | |
| KIR2DL3/NM_01 | CTATGAGTGGTCAAACTCGAGTGACCCACTGCTTGTTTCTGTCACAGGAAACC | 380 |
| 5868 | CTTCAAATAGTTGGCCTTCACCCACTGAACCAAGCTCCAAAACCGGTAAC | |
| MAGEA10/NM_02 | TGGGACACCACAGAGCAGCACTGAAGGAGAAGACCTGCCTGTGGGTCCCCATC | 381 |
| 1048 | GCCCAAGTCCTGCCCACACTCCCACC | |
| MIF/NM_002415 | TCCGAGCTCACCCAGCAGCTGGCGCAGGCCACCGGCAAGCCCCCCCAGTACAT | 382 |
| | CGCGGTGCACGTGGTCCCGGACCAGCTCATGGCCTTCGGCGGCTCCAGCGAGC | |
| | CGTGCGC | |
| PTPRCAP/ENST0 | TCACTTCTCGCTCGACACAGCCAGAGCTGGAGGTGGGTGCCCGGCACGGAGGG | 383 |
| 0000326294 | GCCTGCGGACCAATGGCTCTGCCCTGCACCTTAGGGCTCGGGATGCTGCTGGC | |
| | CCTGCCAGGGGCCTTGGGCTCGGGTGG | |
| SSX2/NM_003147 | CTCGGAGAAAATCTTCTATGTGTATATGAAGAGAAAGTATGAGGCTATGACTA | 384 |
| | AACTAGGTTTCAAGGCCACCCTCCCACCTTTCATGTGTAATAAACGGGCCGAA | |
| | GACTTCCAGG | |
| TCF7/NM_003202 | CTCTCTACGAACATTTCAACAGCCCACATCCCACCCCTGCACCTGCGGACATC | 385 |
| | AGCCAGAAGCAAGTTCACAGGCCTCTGCAGACCCCTGACCTCTCTGGCTTCTA | |
| | CTCCCTGACCTCAGGC | |
| XAGE1B/NM_001 | AGATAATACCTAAAGAGGAACACTGTAAAATGCCAGAAGCAGGTGAAGAGCAA | 386 |
| 097594 | CCACAAGTTTAAATGAAGACAAGCT | |
| CEACAM8/NM_00 | GTGAAATACAGAACCCAGCGAGTGCAAACTTCAGTGACCCAGTCACCCTGAAT | 387 |
| 1816 | GTCCTCTATGGCCCAGATGCCCCCACCATTTCCCCTTCAGACACCTATT | |
| CXCR3/NM_001504 | CACCAAAGCAGAGGGGCAGGCAGCACACCACCCAGCAGCCAGAGCACCAGCCC | 388 |
| | AGCCATGGTCCTTGAGGTGAGTGACCACCAAGTGCTAAATGACGCCGAGGTTG | |
| | CCGCCCTCCTGGAGAACTTCA | |
| FCGR1A/NM_000 | CCATTGCTCAGGCATGGGAAAGCATCGCTACACATCAGCAGGAATATCTGTCA | 389 |
| 566 | CTGTGAAAGAGCTATTTCCAGCTCCAGTGCTGAATGCATCTGTGACATCCCC | |
| FCGR3B/NM_000 | AGCGGCTCCTACTTCTGCAGGGGGCTTGTTGGGAGTAAAAATGTGTCTTCAGA | 390 |
| 570 | GACTGTGAACATCACCATCACTCAAGGTTTGGCAGTGTCAACCATCTCA | |
| FYB/NM_001465 | CTGGAAACAGTACTAGCAAAGGCCAGACGTCTTACTCAACAACTTCCCTGCCA | 391 |
| | CCACCTCCACCATCCCATCCGGCCAGCCAACCACCATTGCCAGCATCTCAC | |
| HLA- | GCAGCACGAGGGGCTGCAAGAGCCCCTCACCCTGAGCTGGGAGCCATCTTCCC | 392 |
| C/NM_002117 | AGCCCACCATCCCCATCATGGGCATCGTTGCTGGCCTGGCTGTCCTGGTTG | |
| HLA- | AGGAAGGTGCATCACCATCTACAGGAGAAGAAGAATGGACTTGCTAAATGACC | 393 |
| DQA2NM_020056 | TAGCACTATTCTCTGGCCTGATTTATCATATCCCTTTTCTCCTC | |
| IFNG/NM_00061 | GTGTGGAGACCATCAAGGAAGACATGAATGTCAAGTTTTTCAATAGCAACAAA | 394 |
| 9 | AAGAAACGAGATGACTTCGAAAAGCTGACTAATTATTCGGTAACTGA | |
| KIR2DL1/NM_01 | CGCGGCTGCCTGTCTGCTCCGGCAGCACCATGTCGCTCTTGGTCGTCAGCATG | 395 |
| 4218 | GCGTGTGTTGGGTTCTTCTTGCTGCAGGGGGCCTGGCCACATGAGGGAGTCCA | |
| | CAGAAAACCTTCCCTCCTGGCCCACCC | |
| KRT5/NM_00042 | AACTTCATGAAGATGTTCTTTGATGCGGAGCTGTCCCAGATGCAGACGCATGT | 396 |
| 4 | CTCTGACACCTCAGTGGTCCTCTCCATGGACAACAACCGCAACCTGGAC | |
| LMNA/NM_17070 | AAGGAGCTGAAAGCGCGCAATACCAAGAAGGAGGGTGACCTGATAGCTGCTCA | 397 |
| 7 | GGCTCGGCTGAAGGACCTGGAGGCTCTGCTGAACTCCAAGGAGGCCGCACTGA | |
| | GC | |
| PTPN11/NM_002 | CTCCCGAGTGATTGTCATGACAACGAAAGAAGTGGAGAGAGGAAAGAGTAAAT | 398 |
| 834 | GTGTCAAATACTGGCCTGATGAGTATGCTCTAAAAGAATATGGCGTCATGCGT | |
| | G | |

TABLE 2
primer pair sequences of the immune response assay

| | | SEQ | | SEQ |
|---|---|---|---|---|
| Gene/ | | ID | | ID |
| Accession | PRIMER1 | NO: | PRIMER2 | NO: |
| CD63/ | TTCCATGUCGAAGAACCGAGUC | 399 | GCAGCUACCACCAGCACAUT | 400 |
| NM_001780 | | | | |
| CD69/ | CGTCAUGAAGGGTCCTUCCAA | 401 | ATGGCTGTCUGATGGCATUG | 402 |
| NM_001781 | | | A | |
| CXCL1 | CAATCCTGCAUCCCCCAUAGT | 403 | TGTCTCTCTTTCCUCTTCTG | 404 |
| NM_001511 | | | TTCCUA | |
| KLRD1 | GUGAACAGAAAACTUGGAACGA | 405 | CGGTGTGCUCCTCACTGUAA | 406 |
| NM_002262 | AAGT | | | |
| HLA-DOB | CCAUGACUCAAGGCACAGACT | 407 | TCCCCACAUCACTGUCGAAA | 408 |
| NM_002120 | | | C | |
| CXCR5 | TCTCAACAUAAGACAGTGACCA | 409 | ACCAGGGAGGUGTCGTTAUA | 410 |
| NM_001716 | GUCT | | GT | |
| IL12B | CTGGCCAGUACACCTGUCA | 411 | TCTTGGCCUCGCATCTUAGA | 412 |
| NM_002187 | | | AAG | |
| PTK7 | GCAAACCCGGCUACTUGGA | 413 | CATCATACACCUCCACGCTG | 414 |
| NM_002821 | | | UT | |
| CEACAM1 | TGTGGAATTAUCACCCATCATC | 415 | ACAAGATCUCCCAAGTCCTC | 416 |
| NM_001712 | AUCC | | CAUA | |
| CXCL9 | TGUTCCTGCAUCAGCACCAA | 417 | GCTGAATCTGGGUTTAGACA | 418 |
| NM_002416 | | | TGTTUGAA | |
| IL13 | CAGCCCUGGAATCCCUGAT | 419 | AAACTGGGCCACCUCGATUT | 420 |
| NM_002188 | | | | |
| NT5E | GAAATGGAUAAACTCATCGCUC | 421 | CCGCCCAUCATCAGAAGUGA | 422 |
| NM_002526 | AGAAAG | | | |
| VEGFA | CAGCTTGAGTUAAACGAACGTA | 423 | CGGCAGCGUGGTTTCTGUA | 424 |
| NM_001171623 | CTUG | | | |
| ABCF1 | CTGAGCAUCCCUCCCAACAT | 425 | TTGTTCCAGCUGTCCCUGAA | 426 |
| NM_001025091 | | | G | |
| CD38 | GGCCCAUCAGTUCACACAGG | 427 | CTGCAGTCCUTTCTCCAGUC | 428 |
| NM_001775 | | | T | |
| JAML | CUAGAGTGCUCGCAGCAGT | 429 | ACTGGCAGCAGGAUGAGTTU | 430 |
| NM_001098526 | | | C | |
| S100A8 | GTCTACCACAAGUACTCCCTGA | 431 | ACCATCAGTGTUGATATCCA | 432 |
| NM_002964 | UAAAG | | ACTCTTUG | |
| MYC | GCTTCTCUGAAAGGCTCTCCUT | 433 | AAAUACGGCUGCACCGAGT | 434 |
| NM_002467 | | | | |
| IRF1 | CCAGGCTACAUGCAGGACUT | 435 | GGGTGACACCUGGAAGTTGU | 436 |
| NM_002198 | | | A | |
| CCL22 | TGGTTGTCCUCGTCCTCCUT | 437 | AGTCTGAGGUCCAGTAGAAG | 438 |
| NM_002990 | | | TGUT | |
| CXCR2 | TGGAGGTGUCCTACAGGUGAAA | 439 | GGCAGGGUAGAGCTGTAACU | 440 |
| NM_001557 | | | G | |
| IFITI | TGCAGAACGGCUGCCTAATUT | 441 | CAAGACTCTGTTUTCTAAAT | 442 |
| NM_001548 | | | CAGGCAUT | |
| IFIT2 | GCAGAAGAGGAAGAUTTCUGAA | 443 | TCAAGTTCCAGGUGAAATGG | 444 |
| NM_001547 | GAGT | | CAUT | |
| CD68 | CAGACAGCCUAGCTGGACUT | 445 | CGTGAAGGAUGGCAGCAAAG | 446 |
| NM_001251 | | | UA | |
| M6PR | CTCCCAUCCCCAGAAGGGUAT | 447 | TCTGTCUGCCAGGATTCTCU | 448 |
| NM_002355 | | | CA | |
| SH2D1A | ACCGAGUGUCCCAGACAGA | 449 | TCAACTGGATACUGCAGAGG | 450 |
| NM_002351 | | | TATUACA | |
| ISG20 | GTCCACUGACAGGCTGTUGT | 451 | ATCGTTGCCCUCGCATCUT | 452 |
| NM_002201 | | | | |
| GBPI | GACTTTGUGTGGACACUGAGAG | 453 | ATACAGAGTCUGGGCAGGTU | 454 |
| NM_002053 | A | | AAAAG | |
| TBP | GCGCAAGGGUTTCTGGTTUG | 455 | CCAGTGCCAUAAGGCATCAT | 456 |
| NM_003194 | | | UG | |
| STAT6 | GCTGGACAGAGCUACAGACCUA | 457 | GCCGCUGCACTTTTTCUGG | 458 |
| NM_003153 | T | | | |
| ID3 | CTCAGCTUAGCCAGGUGGAA | 459 | GAGATGACAAGUTCCGGAGU | 460 |
| NM_002167 | | | GA | |
| CX3CL1 | ACGTGCAGCAAGAUGACAUCA | 461 | GTCCTTGACCCAUTGCTCCU | 462 |
| NM_002996 | | | T | |
| KLRB1 | AGGGTUCACCTTGGCAUCAAT | 463 | TGCTCUGTTGAATGUCCACA | 464 |
| NM_002258 | | | CT | |
| TNFSF4 | CGGTATCCUCGAATTCAAAGTA | 465 | GAGATGAGAUAAAACCCATC | 466 |
| NM_003326 | UCAAAGT | | ACAGTUGA | |
| CD52 | CCTGAGATCACCUAAAAAGCTG | 467 | TGGTTTGGCUGGTGTCGTUT | 468 |
| NM_001803 | CUA | | | |
| IL10RA | GTCTGTGTGGUTTGAAGCAGAA | 469 | GACAGGGTCUGGCTACAGUT | 470 |
| NM_001558 | TTUT | | | |
| HLA-DOA | ACCACACGGACUGAGACTGAUT | 471 | GTCCGUAGGAGCCCATGUG | 472 |
| NM_002119 | | | | |
| IFNB1 | TGTGCCUGGACCATAGUCAGA | 473 | AACAGCAUCTGCTGGTUGAA | 474 |
| NM_002176 | | | GA | |
| CCR5 | GGCCAGAAGAGCUGAGACAUC | 475 | GGCTGCGAUTTGCTUCACA | 476 |
| NM_001100168 | | | | |
| IKZF3 | AGTGGAAAGAUGAACTGCGAUG | 477 | TGGCGGAGGAGGUTACCUT | 478 |
| NM_012481 | T | | | |
| STAT1 | CGATGGGCUCAGCTTUCAGA | 479 | ACAAAACCUCGUCCACGGAA | 480 |
| NM_007315 | | | T | |
| CD6 | CAGAUGAGGAGGUCCAGCAAA | 481 | TGCTCCUCGGGTGATACUGA | 482 |
| NM_006725 | | | | |
| BRCA1 | CUGAAAGCCAGGGAGTUGGT | 483 | CUTGTTTCACTCUCACACCC | 484 |
| NM_007300 | | | AGAT | |
| CorOIA | TGTGCTGUCAACCCTAAGTTUG | 485 | CAGGCGAUGTCUAGCACAGG | 486 |
| NM_007074 | T | | | |
| TBX21 | GGAUGCGCCAGGAAGTTUCA | 487 | CTCTGGCUCTCCGTCGUT | 488 |
| NM_013351 | | | | |
| KLRK1 | GTGGGAAGAUGGCTCCATUCT | 489 | ACACAGUCCTTTGCAUGCAG | 490 |
| NM_007360 | | | AT | |
| CXCR6 | TCATCTCUGGAACAAACUGGCA | 491 | CTTGCTGAACUGCAGGAAGU | 492 |
| NM_006564 | AA | | C | |
| PTEN | AGCGUGCAGATAAUGACAAGGA | 493 | GATTTGACGGCUCCTCTACU | 494 |
| NM_000314 | A | | GT | |
| PMEL | CCUGGAACAGGCAGCTGUAT | 495 | TTCCAGGGAAGUTCAAGGCA | 496 |
| NM_006928 | | | AUAG | |
| DMBT1 | ACTACTCCAGUCCCTCCAAUGA | 497 | GCCGACACUCGTAGTAUCCA | 498 |
| NM_007329 | C | | T | |
| IFI44L | AAGTGGATGATUGCAGTGAGGU | 499 | CAAATCUGAAGCATAGTTUC | 500 |
| NM_006820 | T | | CAACCAT | |
| LAPTM5 | TGACCCTCUGCAGCTCCUA | 501 | GACAGTGAUGAAGGCGAUGG | 502 |
| NM_006762 | | | A | |
| CD226 | CGUCATCGTCAUCCCCGAT | 503 | CAGCCACAAAGAGGGUATAT | 504 |
| NM_006566 | | | TGGTUA | |
| TNFSF13B | GATCTTACACATUTGTTCCATG | 505 | GATGTCCCAUGGCGUAGGT | 506 |
| NM_006573 | GCUT | | | |
| ICOS | CTTGGACCAUTCTCAUGCCAAC | 507 | GCACAUCCTATGGGUAACCA | 508 |
| NM_012092 | | | GAA | |
| CD160 | AGAGCCAACAUTTGCTTCAAGT | 509 | GGAAGCUGAGCTGGTGAUGT | 510 |
| NM_007053 | UC | | | |
| TRIM29 | TGCAUGTUCCAGGAGCACAA | 511 | CTTCTCCTTCUGCCACTTCU | 512 |
| NM_012101 | | | CA | |
| LST1 | ATGAGGAACUTGAGGCAAGUCA | 513 | CCAGGCCCCCGUAGATACAT | 514 |
| NM_007161 | | | AUA | |
| ZBTB46 | CGGCGCUCATGAGUAAGAACA | 515 | CGGACACTUGAACTTCTTCC | 516 |
| NM_025224 | | | UGAT | |
| VTCN1 | CUGGTTGTGAGUCACCAAGGAA | 517 | TGCAAUTGCUCCAGCCAGAA | 518 |
| NM_024626 | | | | |
| KREMENI | ACAGUCACAGCCATTGUAGCA | 519 | GGAAATTGAAGUGGAAGGCT | 520 |
| NM_032045 | | | TGUAAA | |
| PDCD1LG2 | TGAGCCUGGAATTGCAGCUT | 521 | TGGCTGTTATUGCTCCAAGG | 522 |
| NM_025239 | | | UT | |
| TUBB | CTCTGTTCGCUCAGGTCCTUT | 523 | GCCTCCUTCCGUACCACAT | 524 |
| NM_178014 | | | | |
| CLEC4C | TCCCAAGUGCAACCTCTGUC | 525 | GGTGCAGAAGCUCTTGTAUC | 526 |
| NM_130441 | | | ACT | |
| CD86 | CACTATGGGACUGAGTAACATT | 527 | CTAGCTCACUCAGGCTTUGG | 528 |
| NM_175862 | CTCUT | | T | |
| HAVCR2 | CTACTGCUGCCGGAUCCAAA | 529 | TGTCCCCUGGTGGUAAGCA | 530 |
| NM_032782 | | | | |
| GZMH | GGCCTTTGUTCAGTTTCUGCAA | 531 | GTCCGCTCCUGTTCCTTGAU | 532 |
| NM_033423 | | | AT | |
| NFATC1 | CCCCTATUCCTGTAACGGUCAA | 533 | GCATACCCCUGCTGAACUGA | 534 |
| NM_172387 | | | G | |
| CD8B | CGGAAGACAGUGGCATCTACUT | 535 | GTAACCGGCACACUCTCTUC | 536 |
| NM_172213 | | | T | |
| BCL2 | GTGGATGACUGAGTACCUGAAC | 537 | GGCCAAACUGAGCAGAGTCU | 538 |
| NM_000633 | C | | T | |
| GADD45GIP1 | CGAAUGGUACCCGAGCCT | 539 | GCTGCCAGUTCACAATCATC | 540 |
| NM_052850 | | | UG | |
| CBLB | GCGTGTCUCTGGACAGCUA | 541 | GGGTCCAACUGCATCCUGAA | 542 |
| NM_170662 | | | | |
| ITGA1 | CCAGACTAUGACAGCTCTTGGA | 543 | CTTGGATGACCUTCTTCAGU | 544 |
| NM_181501 | AUA | | CGAT | |
| CD8A | GAACCGAAGACGUGTTUGCAAA | 545 | GGAAGGACUTGCTCCCUCAA | 546 |
| NM_171827 | T | | A | |
| IL2RA | GGAAGATGGATUCATACCTGCT | 547 | AGTTCAACATGGUTCCTTCC | 548 |
| NM_000417 | GAUG | | TTGUAG | |
| EIF2AK2 | TGGCGGUCTTCAGAAUCAACAT | 549 | GCTTCTGACGGUATGTATTA | 550 |
| NM_001135651 | | | AGTUCCT | |
| MADCAM1 | CACGCAGGGAGAAGUGAUCC | 551 | GCAGCGTTUCCAGAGGTGAU | 552 |
| NM_130760 | | | A | |
| PTPN6 | GTCGGAGUACGGGAACAUCAC | 553 | GCTGACCGCUGCTTCTUCA | 554 |
| NM_080548 | | | | |
| LRG1 | AGAGCTACCAUGTCCTCTUGGA | 555 | CGGAACACCUGGCAGTCTUT | 556 |
| NM_052972 | | | | |
| ADGRE5 | CTGGGTCTUTGGCCTGTUCA | 557 | GGCCCACUTCCGGTATUCT | 558 |
| NM_078481 | | | | |
| SH2D1B | ACCAAGCAAGACUGUGAGACC | 559 | GTGTTTCTCTCUGAAGATTC | 560 |
| NM_053282 | | | GGTAUGT | |
| ITGB2 | GCTGGGCUTCACGGACAUAG | 561 | TTTTCCCAATGUAGCCAGTG | 562 |
| NM_000211 | | | UCA | |
| HLA-DPA1 | GCGCCCUGAAGACAGAAUGT | 563 | CCTGTTGGTCUATGCGTCTG | 564 |
| NM_033554 | | | UA | |
| DGAT2 | CTTCTCTGUCACCTGGCUCAAT | 565 | GCGAUGAGCCAGCAAUCAG | 566 |
| NM_032564 | | | | |
| IGFIR | CTACGTGAAGAUCCGCCATUCT | 567 | TGGTCCCAGUCCCACAGUT | 568 |
| NM_000875 | | | | |
| TAGAP | CCAUCTGCATUGGACCCAACA | 569 | GCACUGGAATGTTCUCCCCA | 570 |
| NM_054114 | | | AA | |
| LMNA | TGAACTCTCCCUATGTGTGGTC | 571 | CCGACAUCAGAGACACACUG | 572 |
| NM_170707 | UT | | G | |
| NCAM1 | TGTGGACAUCACCTGCTACTUC | 573 | ATGGGCTCCUTGGACTCAUC | 574 |
| NM_181351 | | | | |
| TIGIT | GTCGCUGACCGTGAACGAUA | 575 | ATGGCUCCAAGCAATGGAAU | 576 |
| NM_173799 | | | CT | |
| IL17F | GCAUACACAGGAAGATACATUC | 577 | TGCCGCCUCACUCAGAAAG | 578 |
| NM_052872 | ACAGA | | | |
| HLA-F-ASI | ACUGAAGCGACAAGGTGUGT | 579 | CATCTGGTTCUCCCTGGTTC | 580 |
| NR_026972 | | | UT | |
| CD247 | CUGAGGGAAAGGACAAGAUGAA | 581 | TGACACCATAGAUGAAGAGG | 582 |
| NM_198053 | GT | | ATUCCA | |
| CD79B | CAACAACACCUCGGAGGTCUA | 583 | GGCACGAUGATGAAGAGGAU | 584 |
| NM_001039933 | | | GAT | |
| IDO2 | CAATTGATTGAUGCTCACCAGC | 585 | CCUCTCCTTCCUGCCAGACA | 586 |
| NM_194294 | UT | | | |
| IL4 | GCACAAGCAGCUGAUCCGA | 587 | CTCTCTCATGAUCGTCTTTA | 588 |
| NM_000589 | | | GCCTUT | |
| TYROBP | ACTGAGACCGAGUCGCCTUA | 589 | GGCTUCAGGAATGGCUGGAT | 590 |
| NM_198125 | | | | |
| BTLA | GACATTGCCUGCCATGCUT | 591 | TCTCCTGCUAAGATGGAGTG | 592 |
| NM_181780 | | | TUCA | |
| AKT1 | CCATGAGCGACGUGGCTAUT | 593 | CTCACGTUGGTCCACAUCCT | 594 |
| NM_001014431 | | | | |
| IL2RG | TGCATUGGAAGCCGTGGUT | 595 | AAAAGTTCCCGUGGTATTCA | 596 |
| NM_000206 | | | GUAACA | |
| POLR2A | TGGTGGACAAGAUGGATGATGA | 597 | CCTCCGTGAUGATGATCTTC | 598 |
| NM_000937 | UG | | TTCUT | |
| ITGAX | CCAACATCUGCCTTTACATUGA | 599 | GGCTCAGACUCCGGTTCTUT | 600 |
| NM_000887 | CAAAC | | | |
| ILIB | CCTGTCCUGCGTGTUGAAAGA | 601 | GGGAACUGGGCAGACTCAAA | 602 |
| NM_000576 | | | UT | |
| CSF2RB | CGUCTCTGTUCAGCCAAGGAG | 603 | TGGTCTATGTGUTCGTATCG | 604 |
| NM_000395 | | | CATUT | |
| DDX58 | CCCAACCGAUATCATTTCTGAT | 605 | TTGGGCCAGUTTTCCTTGUC | 606 |
| NM_014314 | CUGT | | T | |
| KTAA0101 | CCCAACUCCCAAGUGGCAAA | 607 | TGUGATCAGGTUGCAAAGGA | 608 |
| NM_014736 | | | CA | |
| CD274 | GTACCGCUGCATGATCAGCUA | 609 | GTAGCCCUCAGCCUGACAT | 610 |
| NM_014143 | | | | |
| LAMP3 | GCAGUCGGGCATTCCTUCA | 611 | GTGTAGUCAGACGAGCACUC | 612 |
| NM_014398 | | | AT | |
| TNFAIP8 | CTGCAGCUGGTTATCCUGACA | 613 | AAGGTGGUGGCGATGGATUT | 614 |
| NM_014350 | | | | |
| FOXP3 | GCGGACCAUCTTCTGGAUGA | 615 | AGCCTTGGUCAGTGCCATUT | 616 |
| NM_014009 | | | | |
| IL12A | GAAGATGUACCAGGTGGAGTUC | 617 | GATTTTTGUGGCACAGTCUC | 618 |
| NM_000882 | AA | | ACT | |
| SAMHD1 | AGAGUTTGTAUGCCGCAAGACA | 619 | GGCGAGTUGGATTTTGGACU | 620 |
| NM_015474 | | | GA | |
| SITI | GTGTGCTUGTGGACTCUCACA | 621 | GCCAGCGAGAUGAGAAAUAG | 622 |
| NM_014450 | | | GA | |
| CD3E | AATTGTCATAGUGGACATCTGC | 623 | GTGGTGGCCUCTCCTTGTUT | 624 |
| NM_000733 | AUCA | | | |
| ICOSLG | AGTTTCACUGCCTGGTGTUGA | 625 | GTACACGUGAAGGTGAGCUC | 626 |
| NM_015259 | | | AT | |
| HGF | GGACTAACAUGTTCAATGUGGG | 627 | GAGTGGATUTCCCGTGUAGC | 628 |
| NM_000601 | ACAA | | A | |
| MELK | CATATCCTTACUGGAGAGATGG | 629 | GGCTGTCUCTAGCACAUGGT | 630 |
| NM_014791 | TAGCUAT | | | |
| IGSF6 | AGAGTGACTUCAAATGACAGUG | 631 | TCAGGAAGCUCCGCAGTUC | 632 |
| NM_005849 | CAA | | | |
| GNLY | CACCUGCGTGAUGAGGAGAAA | 633 | GTGGGCTTAUCCACCATCTU | 634 |
| NM_006433 | | | CT | |
| TD02 | CTCCGUGCTTCUCAGACAGT | 635 | GACCTCCTTUGCTGGCTCTA | 636 |
| NM_005651 | | | UT | |
| KRT7 | CCTCAACAACAAGUTTGCCUCC | 637 | AGCAATCUGGGCCTCAAAGA | 638 |
| NM_005556 | T | | UG | |
| HLA-E | CCGAGCAAAAGUCAAATGAUGC | 639 | GGTGGTGAGUCACGTGUGT | 640 |
| NM_005516 | C | | | |
| HLA-DMA | GAACGCACUGCCCUCAGAT | 641 | CATCAAACTCUGGTCTGGAA | 642 |
| NM_006120 | | | GAAUCA | |
| LAMPI | GTGCGUCAGCAGCAATGTUT | 643 | GCACCACUGTGGCATCUGA | 644 |
| NM_005561 | | | | |
| NTN3 | CGGGAGGGCUTCTAUCGAGA | 645 | CCAUCCTUGCAGGGACACT | 646 |
| NM_006181 | | | | |
| CD28 | CCTCCTCCUTACCTAGACAAUG | 647 | CAAGCUAUAGCAAGCCAGGA | 648 |
| NM_006139 | AGA | | CT | |
| TARP | ATGTCAUCACAATGGAUCCCAA | 649 | ACAGCAGGUGATGAUGGCAA | 650 |
| NM_001003806 | AGA | | | |
| EGFR | GTGAGTTGAUCATCGAATTCUC | 651 | CCACCACGUCGTCCATGUC | 652 |
| NM_005228 | CAAAAT | | | |
| CCR4 | CCTGAGCAAGCCUGGCAUT | 653 | ATCGAGGGUGGTGTCTGCTA | 654 |
| NM_005508 | | | UA | |
| MAGEA3 | GAGATTCUCGCCCUGAGCAA | 655 | AGATCTTCUCCTTCAGTGCU | 656 |
| NM_005362 | | | CCT | |
| BATF | GTGUGAGAGCCCGGAAGATUT | 657 | TCTGGGCGGCAAUACGATTU | 658 |
| NM_006399 | | | T | |
| KLRG1 | AGTGAGGCCUTTTGCTGGAUT | 659 | ACAGCUTGAGGCTUGAAGAC | 660 |
| NM_005810 | | | C | |
| IRSI | CGCCGCUCAAGTGAGGAUT | 661 | GGGUACCCATGAGTUAGAAG | 662 |
| NM_005544 | | | AGGAT | |
| CSF1R | GCTGGAAGAUCATCGAGAGCTA | 663 | CCUCCACCACCTUCCCAAAG | 664 |
| NM_005211 | UG | | | |
| CTLA4 | CGCCATACUACCTGGGCAUA | 665 | TCAAAGAAACAGCUGUGAGG | 666 |
| NM_005214 | | | AGAAA | |
| TNFSF18 | CATTCAAGAACUCAAGGAGCUC | 667 | ACTTAGCCAUACAGGGCTCC | 668 |
| NM_005092 | AGA | | TUA | |
| POU2AF1 | CCAAACUGTCGGCTUCAAAGAG | 669 | TCCTCCUCAGCAGTTCCTUC | 670 |
| NM_006235 | | | A | |
| GZMA | AGTAACTCCTCAUTCAAGACCC | 671 | TGAGCCCCAAGAAUGACCUG | 672 |
| NM_006144 | UACAT | | | |
| PIK3CA | CCCTTATGUGACAATGTGAACA | 673 | AGCACCCUTTCGGCCTUT | 674 |
| NM_006218 | CUCA | | | |
| ITK | CAAAGAAGCCUCTTCCTCCTAC | 675 | TGUCCAGCAGGCAGTACUCT | 676 |
| NM_005546 | UC | | | |
| IFI27 | CTTAAGACGGUGAGGTCAGCUT | 677 | ACACTGGUCACTGCTGAUGA | 678 |
| NM_005532 | | | G | |
| EOMES | CTCAATCCCACUGCCCACUAC | 679 | AGGAGACTCUGGGTGAACAU | 680 |
| NM_005442 | | | AGAT | |
| LCN2 | CAGGACUCCACCUCAGACCT | 681 | TTTTGCGGGUCTTTGTCTTC | 682 |
| NM_005564 | | | UCT | |
| CD80 | CCAAGTGTCCAUACCTCAATTT | 683 | TTGUGCCAGCTCTUCAACAG | 684 |
| NM_005191 | CTTUCA | | A | |
| CD83 | CCGAAACACUACCAGCUGCAA | 685 | TCCGCTCTGTATUTCTTAAA | 686 |
| NM_004233 | | | AGTCTCTUC | |
| CXCL13 | TGTGUCCAAGAGAGCTCAGUCT | 687 | CCATTCAGCUTGAGGGUCCA | 688 |
| NM_006419 | | | | |
| MTOR | GGAAGAGGCAUCTCGTTTGUAC | 689 | GCCTCCATUAAATCTCGACC | 690 |
| NM_004958 | T | | AUAGG | |
| FCERIG | CGATCUCCAGCCCAAGATGAUT | 691 | CGACAGUAGAGGAGGGUGAG | 692 |
| NM_004106 | | | G | |
| TFRC | CACACCTGGAUTCCCTTCCUT | 693 | GUTTTCCAGUCAGAGGGACA | 694 |
| NM_001128148 | | | GT | |
| RORC | GGAAGTGGUGCTGGTUAGGA | 695 | CTTAGGGAGUGGGAGAAGUC | 696 |
| NM_005060 | | | AAAG | |
| MMP9 | CTTUGACAGCGACAAGAAGUGG | 697 | CCCTCAGUGAAGCGGUACA | 698 |
| NM_004994 | | | | |
| BST2 | CGCAATGUCACCCATCUCCT | 699 | TTTCTTTTGTCCUTGGGCCT | 700 |
| NM_004335 | | | UCT | |
| PIK3CD | CTTCCCCGAUTGCCACGUA | 701 | CGGUCCAGCAGGAATTUGGT | 702 |
| NM_005026 | | | | |
| FCGR2B | CTCCCAGCUCTUCACCGAT | 703 | CTCCCATTUCCCTGCACUCA | 704 |
| NM_004001 | | | | |
| TNFRSF14 | GGAGGAAUGUCAGCACCAGA | 705 | TCACACATATGAUTAGGCCA | 706 |
| NM_003820 | | | ACUGT | |
| OAS3 | TGCGGAGGAACUTTGUGAACA | 707 | AGGCGAAGAUGGUCAGCAAT | 708 |
| NM_006187 | | | | |
| GRAP2 | CATGGAAGCUGTTGCCAAGUT | 709 | AAATTCTUGGGCACATATCC | 710 |
| NM_004810 | | | TUCCT | |
| CCNB2 | GGTCGACCCUTGCCACUAC | 711 | AGCTGCUGCTACCTUAGAAG | 712 |
| NM_004701 | | | GA | |
| MLANA | GATCGGCAUCCTGACAGUGA | 713 | CCCTTCTTGUGGGCATCTTC | 714 |
| NM_005511 | | | UT | |
| MAGEA12 | GAGATTCUCGCCCUGAGCAA | 715 | TGGUCAGGGCAGCAGGUA | 716 |
| NM_005367 | | | | |
| VCAM1 | TGCCGAGCUAAATTACACATTG | 717 | CATGGUCACAGAGCCACCUT | 718 |
| NM_001078 | AUGA | | | |
| CDKN3 | GTGGCCCUGTAGGACCTUC | 719 | CGATGUCGCACGGTACCUG | 720 |
| NM_005192 | | | | |
| NCRI | GGCACCUACCTTTUAACCACAG | 721 | CTTCCTGCUGAGCCAGTCUT | 722 |
| NM_004829 | A | | | |
| FAS | GGATTGGAATUGAGGAAGACTG | 723 | ACGCAGUCTGGTTCAUCCC | 724 |
| NM_000043 | TTACUA | | | |
| GZMB | ATGACAGUGCAGGAAGAUCGAA | 725 | CTGGGCCACCUTGTUACACA | 726 |
| NM_004131 | A | | | |
| IRF9 | CTCCAGCCAUACUCCACAGAAT | 727 | AACAAAGAGGUGAGGTGGAA | 728 |
| NM_006084 | | | GAUG | |
| IFITM2 | TGCCTGGGCUTCATAGCAUT | 729 | GCAGAATGGUCATGAAGAUG | 730 |
| NM_006435 | | | CC | |
| TNFSF14 | CCAAGCGAAUGAAGCAUCCAA | 731 | GCCTGGGUCCTTCAACCUC | 732 |
| NM_003807 | | | | |
| HLA-B | GGAGTGGCUCCGCAGAUAC | 733 | GTGATCUCCGCAGGGUAGAA | 734 |
| NM_005514 | | | A | |
| SDHA | TTGAGATTTGCUGATGGAAGCA | 735 | GTGCTTTAGGUCTCCATAGA | 736 |
| NM_004168 | UAAGA | | GCUT | |
| NRP1 | GUGGACUCCCGGAGAGGAT | 737 | GAGCTAACGUCGATCTTGTA | 738 |
| NM_003873 | | | AGTCUT | |
| EBI3 | CCGTUACAAGCGUCAGGGA | 739 | AGTCACTCAGUTCCCCGUAG | 740 |
| NM_005755 | | | T | |
| EFNA4 | CAGGTGUCTGTCTGCUGCAA | 741 | GACGAAGAAUCAGAAGCAGC | 742 |
| NM_005227 | | | AGTAAUA | |
| PVR | GGUGGACGGCAAGAATGUGA | 743 | GCCTCATTCUGGCCAAGGUA | 744 |
| NM_006505 | | | | |
| BUBI | GGTTCAGAGCUTTCTGGAGUGA | 745 | CTTGCAATACAUAACAACCT | 746 |
| NM_004336 | | | GCUCAA | |
| SKAP2 | GCAATAGAUGGCTACAGTGUCA | 747 | AGCTGCTGUACCCATTCTUC | 748 |
| NM_003930 | GA | | AG | |
| PRF1 | GGTGGAGUGCCGCTTCUAC | 749 | GGGTGCCGUAGTTGGAGAUA | 750 |
| NM_005041 | | | A | |
| CCL20 | AAAAGTUGTCTGTGUGCGCAAA | 751 | CCCCAGCAAGGUTCTTTCUG | 752 |
| NM_004591 | | | T | |
| TNFRSF18 | GGAGTGCUGTTCCGAGUGG | 753 | TCGAUACACUGGAAGCCAAA | 754 |
| NM_004195 | | | ACT | |
| CTSS | CACCACUGGCATCTCUGGAA | 755 | AGATCGTATGAGUGCATTCC | 756 |
| NM_004079 | | | CATUG | |
| NKG7 | CCCCCAGAUCCAGACCTTCUT | 757 | GCTCTUGCCTTCTGCUCACA | 758 |
| NM_005601 | | | | |
| ISG15 | AGCGAACTCAUCTTTGCCAGUA | 759 | CUTCAGCTCUGACACCGACA | 760 |
| NM_005101 | | | T | |
| PDCD1 | GCGGCCAGGAUGGTTCTUA | 761 | GTTUAGCACGAAGCTCUCCG | 762 |
| NM_005018 | | | AT | |
| SNAI1 | ACCCCAAUCGGAAGCCUAAC | 763 | AGAUGAGCATUGGCAGCGA | 764 |
| NM_005985 | | | | |
| CXCL11 | TTGGCTGTGAUATTGTGTGCUA | 765 | TTTGTCACAGTUGTTACTTG | 766 |
| NM_005409 | CA | | GGUACA | |
| CIITA | GCCTCUACCACTTCTAUGACCA | 767 | CATAAGCCUCCCTGGTCTCT | 768 |
| NM_000246 | GAT | | UC | |
| IFI35 | CCCGGAAGUGCCTAAGTCUT | 769 | CGGCACUCCTCCATGTUGAT | 770 |
| NM_005533 | | | | |
| TNFSF9 | CATGTTUGCGCAGCUGGT | 771 | GCTCCTTCGUGTCCTCTTTG | 772 |
| NM_003811 | | | UAG | |
| TNFSF10 | CGTGTACTTUACCAACGAGCUG | 773 | CGGAGTUGCCACTTGACTUG | 774 |
| NM_003810 | AA | | | |
| MMP2 | GTGCUCCACCACCTACAACUT | 775 | TCAGTGGUGCAGCTGTCAUA | 776 |
| NM_004530 | | | G | |
| EGR3 | GTGACCAUGAGCAGTTTGCUAA | 777 | GGTCAGACCGAUGTCCATUA | 778 |
| NM_004430 | A | | CA | |
| MAGEA1 | AGAGAGAAGCGAGGUTTCCAUT | 779 | TCTCCTTGGUGCTCCTCUGT | 780 |
| NM_004988 | | | | |
| CD163 | CTGTAACTGCTCUAGGTGCTTC | 781 | AGGCCACAGCACUTTCTUCT | 782 |
| NM_004244 | ATUAT | | | |
| IL6 | AGTACCUCCAGAACAGATTUGA | 783 | TCAGCAGGCUGGCATTUGT | 784 |
| NM_000600 | GAGT | | | |
| KLRF1 | CGTTGCACTGGUATAAAATCTT | 785 | CCTCATACUGAGTGGCATTU | 786 |
| NM_016523 | ACUGG | | GAACAA | |
| B3GAT1 | AGCGACCCCUTCUCAGACT | 787 | CGATGAGGACGAUCGCUAGG | 788 |
| NM_018644 | | | A | |
| CIQA | GAGCATCCAGUTGGAGTUGACA | 789 | CCTCCCCUTTCTTCCCGUCT | 790 |
| NM_015991 | | | | |
| OASI | CCTAGUCAAGCACTGGUACCAA | 791 | TCCAAGACCGUCCGAAAUCC | 792 |
| NM_016816 | | | | |
| IKZF2 | TGTGGCAUGGTTTGCATUGG | 793 | CTTCTCTCCAGAGUGTAACT | 794 |
| NM_016260 | | | TTATGUGT | |
| TLR9 | GCCAGACCCUCUGGAGAAG | 795 | TGGAGCUCACAGGGUAGGAA | 796 |
| NM_017442 | | | | |
| KLF2 | CCACTCACACCUGCAGCUA | 797 | GTCUGAGCGCGCAAACUT | 798 |
| NM_016270 | | | | |
| GUSB | GCGAGUAUGGAGCAGAAACGA | 799 | AATTCCAAAUGAGCTCUCCA | 800 |
| NM_000181 | | | ACCA | |
| NFKBIA | GGTGTCCUTGGGTGCUGAT | 801 | AATAGCCCTGGUAGGTAACT | 802 |
| NM_020529 | | | CUGT | |
| IL23A | AATGATGTTCCCCAUATCCAGT | 803 | AGAGAAGGCUCCCCTGUGA | 804 |
| NM_016584 | GUG | | | |
| HERO6 | CTGGTGGUTCCATTUGCAAAGG | 805 | CTGATGAAGCAGCUGAGAGA | 806 |
| NM_017912 | | | UGAT | |
| SLAMF8 | CAGGGAAGGCCUCCUACAAAG | 807 | TCTCUGGACCCACTCTGUCA | 808 |
| NM_020125 | | | | |
| IL15 | GAATCCCAGCUGACUCGCT | 809 | CCACATGGCCAUATATTGGA | 810 |
| NM_000585 | | | AUGGA | |
| TLR7 | ACCTCTCATGCUCTGCTCTCUT | 811 | ACCATCUAGCCCCAAGGAGU | 812 |
| NM_016562 | | | T | |
| OAS2 | CTTTGATGTGCUTCCTGCCTUT | 813 | CGCUGCAGGACTGUGAAAC | 814 |
| NM_016817 | | | | |
| HLA-DRA | CGCTCAGGAAUCATGGGCUAT | 815 | GCCAGACCGUCTCCTTCTUT | 816 |
| NM_019111 | | | | |
| CRTAM | AAGTGCTTACAUTACAGCGACU | 817 | GCUTCTCATGGUGGAGCACA | 818 |
| NM_019604 | CT | | T | |
| MAGEC2 | ACACAGCCUAAAGUCAGCACA | 819 | CGGAAUGGAACGCCUGGAA | 820 |
| NM_016249 | | | | |
| ICAMI | GCCAACCAAUGTGCTATUCAAA | 821 | ACCTGGCAGCGUAGGGUA | 822 |
| NM_000201 | CT | | | |
| CD4 | AGCTCCAAGUCCTCACACAGAU | 823 | GGACUCCCCGGTTCATUGT | 824 |
| NM_000616 | A | | | |
| MAPK14 | GCCCTUGCACATGCCUACT | 825 | GTGGCACAAAGCUGATGACU | 826 |
| NM_139012 | | | T | |
| C1QB | CCUCACAGGACACCAGCTUC | 827 | AGCTGGGCCUGGGAGAUAT | 828 |
| NM_000491 | | | | |
| NOTCH3 | GTGGCGACCUCACTUACGA | 829 | AGGAGGGCACUGGCAGTTAU | 830 |
| NM_000435 | | | A | |
| NCR3 | CCCAGACCUCACTGCUCAGA | 831 | AGGATCCUTCCAGGGUACGA | 832 |
| NM_147130 | | | AT | |
| STAT3 | CCAATUGGAACCTGGGAUCAAG | 833 | CCATGTGAUCTGACACCCUG | 834 |
| NM_139276 | T | | AA | |
| TLR8 | CCACCTCCUGCATAGAGGGUA | 835 | CGCATAACUCACAGGAACCA | 836 |
| NM_138636 | | | GATAUT | |
| CYBB | ACACACATGCCUTTGAGTGGUT | 837 | CAUCATGGUGCACAGCAAAG | 838 |
| NM_000397 | | | T | |
| IKZF4 | GGCCCAAGACUCCAACCATTTU | 839 | TGAGUGAGCGGCUAGGAGAA | 840 |
| NM_022465 | A | | | |
| IFIH1 | ACAGGAGCCAUGCAAGAAGUT | 841 | GCCCATTGUTCATAGGGTUG | 842 |
| NM_022168 | | | AGT | |
| LCK | AGCTTTTCUGTGGCTGGUGAAT | 843 | CCATCCAGUGGGACTATGGG | 844 |
| NM_001042771 | | | AUAA | |
| BCL2L11 | CCAGCACCCAUGAGTTGUGA | 845 | CCGCAACUCTUGGGCGAT | 846 |
| NM_138621 | | | | |
| ITGAM | CGAGUACGUGCCACACCAA | 847 | CATTGAATTCUTCCTGGAUG | 848 |
| NM_001145808 | | | CCAAA | |
| ITGB7 | GCCGGGAAUACAGTCGCTUT | 849 | AGTGTCCCUCCCTCCTUCAG | 850 |
| NM_000889 | | | | |
| JCHAIN | TGCTCCAGTTUTTCAGAAGAAG | 851 | TCCGGGCACACUTACATTUG | 852 |
| NM_144646 | UGA | | T | |
| CD209 | CCTACAGCUGCAGTCTUCCA | 853 | AACGTTGTUGGGCTCUCCT | 854 |
| NM_021155 | | | | |
| SLAMF7 | AACAATCCUAAAGGAAGAUCCA | 855 | GGGAGTGCACUGCTGTCUA | 856 |
| NM_021181 | GCAA | | | |
| IL10 | CCGUGGAGCAGGUGAAGAAT | 857 | TCTATAGAGUCGCCACCCTG | 858 |
| NM_000572 | | | AUG | |
| ILIA | GGCTGCUGCATTACATAATCUG | 859 | AGCACTGGTUGGTCTTCATC | 860 |
| NM_000575 | GAT | | UT | |
| FCGR3A | GUGCCAGACAAACCTCUCCA | 861 | TTATGCAGAGCAGUGTTCTU | 862 |
| NM_000569 | | | CCA | |
| IFNA17 | TCACACTTTCAUGAGTTCCTCC | 863 | GACATCAGCAUGGTCATCTG | 864 |
| NM_021268 | ATUT | | TAAAGUA | |
| EGR2 | CCACGTCGGUGACCATCTUT | 865 | GGAGCAAAGCUGCTGGGAUA | 866 |
| NM_000399 | | | | |
| TOP2A | TGGGTGGUCCTGCAAAAUCC | 867 | ACATATTGATTUGGAGCCAG | 868 |
| NM_001067 | | | TTCTUCA | |
| C10orf54 | CAACCTGACCCUGCTGGAUA | 869 | GAGGAUGGGUACACCACACA | 870 |
| NM_022153 | | | | |
| FOXM1 | CACUGAGAGGAAGCGCAUGA | 871 | CAGACGUCUCCCGGACAA | 872 |
| NM_021953 | | | | |
| AXL | GACUATCUGCGCCAGGGAAA | 873 | GGCCTUCAGTGTGTTCUCCA | 874 |
| NM_021913 | | | A | |
| MS4A1 | GCCCTTGAGAUTTGAGGCCUT | 875 | ACATCCTCCUGAAGAGTGGT | 876 |
| NM_021950 | | | TTUG | |
| IFI6 | CGCTGCTGUGCCCATCUAT | 877 | GCAAGUGAAGAGCAGCAGGU | 878 |
| NM_022873 | | | A | |
| CD3D | GGACAAAGAAUCTACCGUGCAA | 879 | TCUCATGUCCAGCAAAGCAG | 880 |
| NM_000732 | GT | | AA | |
| GPR18 | CGACAGAAGUGGAAGTGCUGAA | 881 | CTGGATGUGAGCTGTUAAAA | 882 |
| NM_001098200 | AA | | GGGA | |
| CD3G | GCCACCTUCAAGGAAACCAGUT | 883 | CTTGAGTCUAGATTTAGGGC | 884 |
| NM_000073 | | | UGAAAGT | |
| ZAP70 | GTGGAGAAGCUCATTGCUACGA | 885 | GTATGTGCCCUGCTCCTUCC | 886 |
| NM_001079 | | | | |
| HMBS | GCACCCUGAGGAATGCATGUAT | 887 | GCCUCAGGAAGGCCCTTUC | 888 |
| NM_000190 | | | | |
| IL7 | GAGTGACTAUGGGCGGUGA | 889 | AGAUGATGCTACUGGCAACA | 890 |
| NM_000880 | | | GAAC | |
| IFIT3 | GGAAACCTCTUCAGCATTTGCU | 891 | GGCAUTTCAGCTGUGGAAGG | 892 |
| NM_001031683 | T | | AT | |
| RBI | CGGTCTTCAUGCAGAGACUGA | 893 | GTGAAATAUAGATGTTCCCU | 894 |
| NM_000321 | | | CCAGGAAT | |
| PTGS2 | CCAGAGCAGGCAGAUGAAAUAC | 895 | AGCTCCACAGCAUCGATGUC | 896 |
| NM_000963 | C | | | |
| TGFB1 | CGTCTGCUGAGGCTCAAGTUA | 897 | GCACAACUCCGGTGACAUCA | 898 |
| NM_000660 | | | A | |
| NCF1 | TGAUGCCCAAAGAUGGCAAGA | 899 | CGCTCTTCUCTACGACCUCC | 900 |
| NM_000265 | | | A | |
| TWIST1 | TTCTCGGUCTGGAGGAUGGA | 901 | CAGCTCCAGAGUCTCTAGAC | 902 |
| NM_000474 | | | UGT | |
| CA4 | AGGACTGCCUGCCCCAUA | 903 | ACATTCCTCGAUGTCCCCTU | 904 |
| NM_000717 | | | CT | |
| SELL | CCTTUGGGCAAGGACCUGAG | 905 | CCCCACAACUTGAAGATGTU | 906 |
| NM_000655 | | | CCAT | |
| LILRB1 | GGTTGTGAUCGGCATCTUGGT | 907 | CCCCUGCAGGATGTUGGAAA | 908 |
| NM_001081637 | | | T | |
| CD14 | CCGCTGTGUAGGAAAGAAGCUA | 909 | ACAAGGTTCUGGCGTGGUC | 910 |
| NM_000591 | AA | | | |
| ALOX15B | GAUCCCGCACACCCGAUA | 911 | AATAGTTCAGCUGCTTCATG | 912 |
| NM_001141 | | | TUCCT | |
| PECAM1 | GCCCCATUGTTCCCGGUT | 913 | GGCACUGCCCACAAGUCA | 914 |
| NM_000442 | | | | |
| NOS2 | TCTCGGCCACCUTTGAUGAG | 915 | ATTTGAGCTCAGAUGTTCTT | 916 |
| NM_000625 | | | CACUGT | |
| FASLG | GCCTGTGTCUCCTTGTGATGUT | 917 | GCTTCTCCAAAGAUGATGCT | 918 |
| NM_000639 | | | GUGT | |
| CD44 | GCAGCACTUCAGGAGGTUACAT | 919 | TGGTTGCUGTCTCAGTUGCT | 920 |
| NM_000610 | | | | |
| ENTPD1 | CCAGGGUGCCAGGATCATUAC | 921 | TCCAAAGCUCCAAAGGTTUC | 922 |
| NM_001098175 | | | CT | |
| CMKLRI | CUGTGATTCUGCCCACGGAA | 923 | CCAATGTGAGUCCTCAGCCA | 924 |
| NM_001142345 | | | AUC | |
| CD53 | GACAGACUGAAGAAACAUCCAA | 925 | TTTCCAGGCACCGUTCCUC | 926 |
| NM_001040033 | GGT | | | |
| TNF | GACAAGCCUGTAGCCCAUGT | 927 | ATGAGGUACAGGCCCTCUGA | 928 |
| NM_000594 | | | T | |
| CXCL8 | CTCTUGGCAGCCTTCCUGAT | 929 | TCCACTCTCAAUCACTCTCA | 930 |
| NM_000584 | | | GTUCT | |
| CD40LG | GAGGCCAGCAGUAAAACAACAU | 931 | ACAGAAGGTGACUTGGGCAT | 932 |
| NM_000074 | C | | AGATAUA | |
| HLA-F | CCCCGCGGGACUCATATTUT | 933 | GACACAGCGGUGCTGAAAUA | 934 |
| NM_001098479 | | | C | |
| GATA3 | GAGAUGGCACGGGACACUAC | 935 | GGTTGTGGUGGTCTGACAGU | 936 |
| NM_001002295 | | | T | |
| LYZ | GTCCAGGGCAAGGUCTTUGA | 937 | CATTGTAGTTTGUAGCTCGT | 938 |
| NM_000239 | | | GTGTUG | |
| ARG1 | GGAAGAAGGCCCUACAGTATUG | 939 | CCCACAGACCUTGGATTCTU | 940 |
| NM_000045 | AG | | CA | |
| IL2RB | CCAGACCCCUCGAAGTTCTTUT | 941 | CTTGTCCCUCTCCAGCACUT | 942 |
| NM_000878 | | | | |
| NECTIN2 | TTCGTCUGCACAGUCACCAA | 943 | CAGCCACAGCAGUAGCAAUG | 944 |
| NM_001042724 | | | | |
| MPO | GGGAGAGGCUCUACCAGGAA | 945 | GTGGGTCCACUGAGTCATTG | 946 |
| NM_000250 | | | UA | |
| CCR2 | TTCTACCTCUAGATCTGTTTGG | 947 | AACGAGATGUGGACAGCAUG | 948 |
| NM_001123396 | TUCAGT | | T | |
| BRCA2 | GTGGUCCACCCCAACUAAAGA | 949 | ACAGACTTCCUTTTGGCCAU | 950 |
| NM_000059 | | | ACAA | |
| ADORA2A | TCGCCATUGACCGCTACAUT | 951 | AGTTGTUCCAACCTAGCAUG | 952 |
| NM_000675 | | | GG | |
| G6PD | CGCCUCCACCAACUCAGAT | 953 | GGTCGUCCAGGTACCCTTUG | 954 |
| NM_000402 | | | | |
| TAPI | TGTGGCCTAUGCAGTCAACUC | 955 | GTGAACUGCATCTGGUAGAG | 956 |
| NM_000593 | | | AACA | |
| MX1 | TTGCAAAGAAGGAAGAUGGTTG | 957 | ATACTGGCUGCACAGGTUGT | 958 |
| NM_001178046 | TTUC | | | |
| HLA-DQB2 | GTGACCGUGATGCTGGUGAT | 959 | CGGTUATAGATGTATCUGGC | 960 |
| NM_001198858 | | | CACAC | |
| CD27 | CTGCTCAGTGUGATCCTTGCAU | 961 | CATUGCGACAGGCACACUC | 962 |
| NM_001242 | A | | | |
| CD276 | CTGCUGGCACAAGGCAAUG | 963 | TCATGCUGGGCTTCGAGUAG | 964 |
| NM_001024736 | | | | |
| STAT4 | CGTCAGCGGCUTTCTCCUA | 965 | TTGAUCCACCTGCUCCAAAA | 966 |
| NM_003151 | | | ACT | |
| PTPN7 | CGGGAGGUCACCCTACACUT | 967 | GGGATGUCCAGGTCTUCGG | 968 |
| NM_001199797 | | | | |
| PTPRC | CTACAGACCCAGUTTCCCCAUT | 969 | AAGGGCUCAGAGTGGTTGTU | 970 |
| NM_002838 | | | T | |
| PSMB9 | CTGCUGCAAATGTGGUGAGAAA | 971 | CACCAAUGGCAAAAGGCUGT | 972 |
| NM_002800 | T | | | |
| CD244 | GAAAGCCACACCCUGAATCUCA | 973 | TCCTTCCUCTTTCTCCUCCA | 974 |
| NM_001166663 | | | CA | |
| CXCR4 | GAACCAGCGGUTACCAUGGA | 975 | GTAGATGGUGGGCAGGAAGA | 976 |
| NM_003467 | | | UT | |
| MAPK1 | GATTCCAGCCAGGAUACAGATC | 977 | GGCTCAAAGGAGUCAAAGUG | 978 |
| NM_002745 | TUAAA | | GA | |
| TP63 | CAGTACTGCCCUGACCCTUAC | 979 | AAAATCCCAGAUATGCUGGA | 980 |
| NM_003722 | | | AAACCT | |
| IRF4 | GCCAGGUGACAGGAACCTUT | 981 | TCACGAGGAUTTCCCGGUAG | 982 |
| NM_002460 | | | T | |
| CCL3 | CCCGGCAGAUTCCACAGAAUT | 983 | CAGGTCGCUGACATATTTCU | 984 |
| NM_002983 | | | GGA | |
| CCL18 | GCAGATUCCACAAAAGTTCATA | 985 | AGCTTCAGGUCGCTGATGTA | 986 |
| NM_002988 | GTUGAC | | TTUC | |
| IL7R | AGCCAAUGACTTTGTGGUGACA | 987 | TGCAGGAGUGTCAGCTTUGT | 988 |
| NM_002185 | T | | | |
| HLA-DRB1 | GACACUCTGGACTUCAGCCA | 989 | GGTCCUGAGAAAGCCCTCUC | 990 |
| NM_002124 | | | T | |
| CEACAM8 | CCUGCCACGCCAATAACUCA | 991 | AGGTCAGGTUCACAGAGTCC | 992 |
| NM_001816 | | | UT | |
| CXCL10 | TCCAGAAUCGAAGGCCAUCAAG | 993 | TGUAGGGAAGTGAUGGGAGA | 994 |
| NM_001565 | | | GG | |
| CCL2 | CGAGCUATAGAAGAAUCACCAG | 995 | TCTTCGGAGUTTGGGTTTGC | 996 |
| NM_002982 | CA | | UT | |
| SRGN | GCAAUCCAGACAGTAATTCUGC | 997 | AAAGTGGGAAGAUACGATTC | 998 |
| NM_002727 | AAAC | | AAGUCC | |
| CD19 | CACUGCCCCGTCTTAUGGAAA | 999 | AGGTTGGAGUCGTTCTCAUA | 1000 |
| NM_001178098 | | | GAACT | |
| ITGB1 | CCTCTACTACCTUATGGACCTG | 1001 | GGCATCACAGUCTTTTCCAC | 1002 |
| NM_002211 | TCTUA | | AAAUG | |
| IFITM1 | GGCTTCATAGCAUTCGCCTACU | 1003 | GGATGAAUCCAATGGTCAUG | 1004 |
| NM_003641 | C | | AGGAT | |
| CCL21 | CUCCAAGACUGGCAAGAAAGGA | 1005 | GCATCTTGGGUTCAGGCTUC | 1006 |
| NM_002989 | | | A | |
| MRC1 | GTTTATGGAGCAGGUGGAAGAT | 1007 | TCGTGCAAUCTGCGUACCA | 1008 |
| NM_002438 | CUAT | | | |
| PGF | CGAGGUGGAGCACATGTUCA | 1009 | GGUCCCCAGAACGGATCTUT | 1010 |
| NM_002632 | | | | |
| ITGAL | GGCTGTCUCGAACGTGUGA | 1011 | AACCATCAAACAGAAAUACC | 1012 |
| NM_002209 | | | AGGTCUAC | |
| ID2 | ATGTCAAAUGACAGCAAAGCAC | 1013 | CAACTTGTCCUCCTTGTGAA | 1014 |
| NM_002166 | UG | | AUGG | |
| CD22 | CTGCTGUCAGGTCTCCAAUGA | 1015 | GCCAGUGACAUGCAAAGAAA | 1016 |
| NM_001771 | | | CT | |
| CCL17 | CTGAAGACGUGGUACCAGACA | 1017 | GCTTCAAGACCUCTCAAGGC | 1018 |
| NM_002987 | | | TUT | |
| ITGAE | CTGAACTGCAGAUCCTTGGUGA | 1019 | CACCAACGCUGCCTTTAAUG | 1020 |
| NM_002208 | A | | A | |
| IL3RA | GAAAGCAAAGGCUCAGCAGUT | 1021 | TGTAGTTGGUCACTTCACAU | 1022 |
| NM_002183 | | | AAGGAAAT | |
| CCR7 | GTGGCTCUCCTTGTCATTTUCC | 1023 | GGGAGGAACCAGGCUTTAAA | 1024 |
| NM_001838 | | | GUT | |
| CD1C | CCTTGGTGATUCTAATAGTCCT | 1025 | CGACGGGAUGGCATCACUA | 1026 |
| NM_001765 | TGUGT | | | |
| MAD2L1 | GCGCGUGCTTTTGTTTGUG | 1027 | CAGATGGATAUATGCCACGC | 1028 |
| NM_002358 | | | UGAT | |
| PYGL | CATGGCAACCCUGGGACUT | 1029 | AATTCUGGGCGGGACTTCUC | 1030 |
| NM_002863 | | | | |
| CD40 | CCUAGACACCUGGAACAGAGAG | 1031 | TCACAGGCCUCACTCGUACA | 1032 |
| NM_001250 | A | | | |
| LY9 | AATGTCTCAUGGAGAAGCAGUG | 1033 | CAUCAGGAACAACCCAAUCC | 1034 |
| NM_002348 | AAA | | AAAG | |
| HLA-G | GCACAGACUGACAGAAUGAACC | 1035 | GCCATCGUAGGCATACTGTT | 1036 |
| NM_002127 | T | | CAUAC | |
| TLR3 | GGACTTUGAGGCGGGTGTUT | 1037 | TCAATAGCTTGTUGAACTGC | 1038 |
| NM_003265 | | | ATGATGUA | |
| CD48 | TGCCAAGUCAGCAATTCTGUGA | 1039 | TCUCAGGTAAGUAACAGGCC | 1040 |
| NM_001778 | | | AAGA | |
| STAT5A | CTGAACAACUGCTGCGUGAT | 1041 | GACTCAAACAGGACUGTGAA | 1042 |
| NM_003152 | | | CTUCT | |
| FCRLA | GGAATTCTCCAUCACCGTGGUA | 1043 | TCTGAGAAUTGGCGCUGGAA | 1044 |
| NM_001184866 | | | A | |
| BCL6 | ACCTGAAAACCCACACUCGAAU | 1045 | GGGUGCCACAGATTUCACAG | 1046 |
| NM_001706 | T | | | |
| ZEB1 | GAGAGGAUCATGGCGGAUGG | 1047 | ACACTTTCTTCTUCCACAAT | 1048 |
| NM_001174093 | | | ATGCAGUT | |
| CCL5 | CTCGCTGUCATCCTCATUGCT | 1049 | GCACTUGCCACTGGTGUAGA | 1050 |
| NM_002985 | | | | |
| IDO1 | CTAAACATCUGCCTGATCTCAU | 1051 | CCCACACAUATGCCATGGUG | 1052 |
| NM_002164 | AGAGT | | AT | |
| IL18 | CCACCTGCUGCAGTCUACA | 1053 | TTCATUGCCACAAAGTTGAU | 1054 |
| NM_001562 | | | GCAA | |
| TNFRSF9 | CCTCACGCUCCGTTTCUCT | 1055 | AGTTCACATCCUCCTTCTTC | 1056 |
| NM_001561 | | | TTCTUCT | |
| HIF1A | AGTACAGGAUGCTUGCCAAAAG | 1057 | GGAGAAAAUCAAGTCGTGCU | 1059 |
| NM_001530 | A | | GAAT | |
| HLA-DPB1 | GCTCUGACGGCGTTACUGAT | 1059 | TCCTCCCGGUTGTAGATGTA | 1060 |
| NM_002121 | | | TCUC | |
| FOXO1 | TCAAGAGCGUGCCCTACTUC | 1061 | GATTGAGCAUCCACCAAGAA | 1062 |
| NM_002015 | | | CTTUT | |
| CD33 | CCAGGAGGAGGGAUAATGGTTC | 1063 | AGUGGCCGGGTTCUAGAGT | 1064 |
| NM_001772 | AUA | | | |
| S100A9 | TCAAAGAGCUGGUGCGAAAAGA | 1065 | GCCTCGCCAUCAGCAUGAT | 1066 |
| NM_002965 | | | | |
| HLA-DMB | CCUGTGTGGUAGAGCACACT | 1067 | CCAGCUGAUCACACCAAGAG | 1068 |
| NM_002118 | | | A | |
| HLA-A | CGGAGUATUGGGACCAGGAG | 1069 | CCACGUCGCAGCCATACATU | 1070 |
| NM_002116 | | | A | |
| SNAI2 | AUGCATATUCGGACCCACACAT | 1071 | CCTGTCTGCAAAUGCTCTGT | 1072 |
| NM_003068 | | | UG | |
| TNFRSF17 | GGCAGTGCUCCCAAAAUGAA | 1073 | TCGCATTCGUTCCTTTCACU | 1074 |
| NM_001192 | | | GA | |
| LRP1 | TCACCUCCAAGACAGTGCTUT | 1075 | TCAGCUCAGGACCTTCAUAC | 1076 |
| NM_002332 | | | ACA | |
| MAGEA4 | CGAGCTUCTGCGTCUGACT | 1077 | AGATCTTCUCCTTGGTGCUC | 1078 |
| NM_001011548 | | | CT | |
| HLA-DQA1 | CCTTCTTCAAGAUCAGTTACCU | 1079 | ACAGTCTCUGTGAGCTCUGA | 1080 |
| NM_002122 | CACC | | CAT | |
| CDID | CCUGCCCCCAATTTGUCAGT | 1081 | GCTTTGGGUAGAATCCUGAG | 1082 |
| NM_001766 | | | ACA | |
| RPS6 | GATGAACGCAAACUTCGTACTT | 1083 | GGTCAAGACACCCUGCTUCA | 1084 |
| NM_001010 | UCT | | | |
| MKI67 | CGTCGTGTCUCAAGATCTAGCU | 1085 | TGAGTCATCUGCGGTACTGU | 1086 |
| NM_002417 | T | | CT | |
| GZMK | GCCATTTAUGGCCTCCAUCCA | 1087 | GAGAGAGAGUGTGCGCCUAA | 1088 |
| NM_002104 | | | A | |
| CD79A | ACUAACCAACCCACUGGGAGAA | 1089 | TCAATGATGCUGGGACCTTG | 1090 |
| NM_001783 | | | UG | |
| CD37 | GCGGGACGUCGUAGAGAAA | 1091 | CCTCTCAGGAUGAGGACTUG | 1092 |
| NM_001774 | | | GA | |
| FUT4 | CAGGTUCCCCTCACAGUCAAT | 1093 | CATGTAGUGGCACCTGCUGA | 1094 |
| NM_002033 | | | A | |
| AIF1 | GGGAGACGUTCAGCUACCC | 1095 | GGGCAACUCAGAGATAGCTT | 1096 |
| NM_001623 | | | TCUT | |
| CCR1 | CACGGACAAAGUCCCTUGGA | 1097 | CCAAAGGCCCUCTCGTUCAC | 1098 |
| NM_001295 | | | | |
| PRDM1 | CAGGCGGAGGCAUCCTUAC | 1099 | AGGAACTGTGUCATTGGTGT | 1100 |
| NM_001198 | | | AGATTUC | |
| CD47 | ACTGGCCTTGGUTTAATTGTGA | 1101 | CUCAGUCCAACCACAGCGA | 1102 |
| NM_001777 | CUT | | | |
| CD74 | CAGGCACUCCTUGGAGCAA | 1103 | GCACTGGAGUGGCAGAUAGT | 1104 |
| NM_001025159 | | | | |
| LAG3 | GCGACTTUACCCTTCGACUAGA | 1105 | GGGAUCCAGGUGACCCAAAG | 1106 |
| NM_002286 | | | | |
| TNFRSF4 | GCCCUGCACGTGGTGUAA | 1107 | CAACTCCAGGCUTGTAGCTG | 1108 |
| NM_003327 | | | UC | |
| CD2 | GACCGATGAUCAGGATATCTAC | 1109 | ACCTCACAGGUCAGGGTUGT | 1110 |
| NM_001767 | AAGGUA | | | |
| CCL4 | GTCCTGTCTCUCCTCATGCTAG | 1111 | CTGCTGGTCUCATAGTAATC | 1112 |
| NM_002984 | UA | | UACCAC | |
| BAGE | CAGGCUCCAACCUCCAGC | 1113 | AGCUGGAGTGTUAGGAGGGC | 1114 |
| NM_182482 | | | | |
| LEXM | AGCCCCCAUTCCTGTUGAC | 1115 | GATATCGCUGCCGCCUGT | 1116 |
| NM_001110533 | | | | |
| CCR6 | GGGCTGAACCAUACACTCCUT | 1117 | AATCAACTGAGTAAUATGAA | 1118 |
| NM_004367 | | | GTATTGACUGACA | |
| CD70 | CCCCCUGCCAGTAUAGCCT | 1119 | GTGATCUGCCTCGTGGUGT | 1120 |
| NM_001252 | | | | |
| CDK1 | GAAGTGUGGCCAGAAGUGGA | 1121 | TCGTTTGGCTGGAUCATAGA | 1122 |
| NM_001786 | | | TTAACAUT | |
| CTAG1B | CATCCUGGGCCAGGCUC | 1123 | GGCTUCAGGGCTGAAUGGAT | 1124 |
| NM_001327 | | | | |
| CTAG2 | TGCGTGAUCCACAUCAACAGG | 1125 | GUCCCGGGAUGCCGCAC | 1126 |
| NM_020994 | | | | |
| CX3CR1 | ATAACAGGCCUCAGCCAAAUCA | 1127 | GGUAAAGTCUGAGCAGGACA | 1128 |
| NM_001171174 | T | | GG | |
| CX3CR1 | AATATAACAGGCCUCAGCCAAA | 1129 | AGCTGACTGUGCTGTGCTUT | 1130 |
| ENST0000 | UCAT | | | |
| 0541347 | | | | |
| CX3CR1 | GTCCCCAAUATAACAGGCCUCA | 1131 | ACAGAGCACCCGCUGUC | 1132 |
| ENST0000 | G | | | |
| 0435290 | | | | |
| CX3CR1 | CCCCAATAUAACAGGCCUCAGC | 1133 | AGGAUGAGAGAACCCCUGGA | 1134 |
| ENST0000 | | | G | |
| 0399220 | | | | |
| GAGE1, GAGE12I, | TATGAGTUGGCGAGGAAGAUCG | 1135 | GGATCCUGACGTTGAGTUGC | 1136 |
| GAGE12F | | | T | |
| NM_001040663 | | | | |
| GAGE12J | TATGAGTUGGCGAGGAAGAUCG | 1137 | GGATCCUGACGTTGAGTUGC | 1138 |
| NM_001098406 | | | T | |
| GAGE2C, GAGE2A, | TATGAGTUGGCGAGGAAGAUCG | 1139 | GGATCCUGACGTTGAGTUGC | 1140 |
| GAGE2E | | | T | |
| NM_001472 | | | | |
| GAGE10 | TATGAGTUGGCGAGGAAGAUCG | 1141 | GGATCCUGACGTTGAGTUGC | 1142 |
| NM_001098413 | | | T | |
| GAGE13 | TATGAGTUGGCGAGGAAGAUCG | 1143 | GGATCCUGACGTTGAGTUGC | 1144 |
| NM_001098412 | | | T | |
| IKZF1 | CATGGATGCUGATGAGGGUCAA | 1145 | GACTCTGTCACUCTTGGAGC | 1146 |
| NM_006060 | | | TUT | |
| IL17A | GAATACCAATACCAAUCCCAAA | 1147 | CCAAGUGGCGGCACTUT | 1148 |
| NM_002190 | AGGUC | | | |
| IL2 | AATCCATCTGTUCAGAAATTCT | 1149 | AAAAACUTTCACTUAAGACC | 1150 |
| NM_000586 | ACAAUGGT | | CAGGGA | |
| IL21 | TTTGGAGAAGUGATTTGAATCT | 1151 | TCAAUTAAAAAGCUGAAGAG | 1152 |
| NM_021803 | TTCUAGGAAT | | GAAACCAC | |
| IL22 | AGGGAACAGCACUTCTUCAAGG | 1153 | GCTAGCUTGGCTGAUAACAA | 1154 |
| NM_020525 | | | CACA | |
| KIR2DL2 | CCUGTCUGCACAGACAGCA | 1155 | CAGGCGACCUGGGUGGG | 1156 |
| ENST00000 | | | | |
| 344867 | | | | |
| KIR2DL3 | GGCTCTTUCCGTGACTCUCC | 1157 | GAACAUGCAGGTGTCUGGG | 1158 |
| NM_015868 | | | | |
| MAGEA10 | ATGATGACTCUGATCAGGGUAG | 1159 | GAGAGCAAGAGGUCAAGAGC | 1160 |
| NM_021048 | GA | | UG | |
| MIF | TGCCGGACGGGUTCCUC | 1161 | TGUGCAGGCUGCAGAGC | 1162 |
| NM_002415 | | | | |
| PTPRCAP | CGCTGTCCUCCGCGCUG | 1163 | CUGCAGACGAGCACUGAGC | 1164 |
| ENST00000 | | | | |
| 326294 | | | | |
| SSX2 | CGGTTAGGGUCATTATCCAAAT | 1165 | AGGAAGAGUGGGAAAAGAUG | 1166 |
| NM_003147 | CATUCC | | AAAGC | |
| TCF7 | ACGGTGUCCCCCAACUCT | 1167 | GGGAGCUGCCCCAUGCT | 1168 |
| NM_003202 | | | | |
| XAGEIB | GTTCCGGCGUCAAGGUGA | 1169 | ATCTAATATAAAACCAGCUT | 1170 |
| NM_001097594 | | | GCGTTGTTUC | |
| CEACAM8 | AGGAATGACGUAGGACCCTAUG | 1171 | GTTGAGATTUACCCCTGCAU | 1172 |
| NM_001816 | AAT | | GGT | |
| CXCR3 | CGTTTTCUCCATAGTCAUAGGA | 1173 | CUGCAGGTTUCCAACCACAA | 1174 |
| NM_001504 | AGAGC | | G | |
| FCGR1A | CCAACATAAGUCACAATGGCAC | 1175 | CCAGAUTCCCCUCCAGGAGT | 1176 |
| NM_000566 | CUA | | | |
| FCGR3B | CATUCCAAAAGCCACACUCAAA | 1177 | GGTACCCAGGUGGAGAGAAU | 1178 |
| NM_000570 | GAT | | GA | |
| FYB | CTGACGAAATUCCACAAAACCT | 1179 | GGGACTGGUGGTTGTGAUGG | 1180 |
| NM_001465 | CUT | | | |
| HLA-C | GAGCAGAGAUACACGTGCCAUA | 1181 | AGCUCCAAGGACAGCUAGGA | 1182 |
| NM_002117 | T | | | |
| HLA-DQA2 | GGCTCTTAUGAATCCCATCCUG | 1183 | AGAGAAGAGGUGAGAGAAGA | 1184 |
| NM_020056 | AAA | | AACATTUG | |
| IFNG | TTTAAAGAUGACCAGAGCAUCC | 1185 | TGCTTTGCGUTGGACATUCA | 1186 |
| NM_000619 | AAAAGA | | AG | |
| KIR2DL1 | GCTGAGCUGAGCUCGGT | 1187 | CUGATTUCACCAGGCGACCT | 1188 |
| NM_014218 | | | | |
| KRT5 | GGTTGATGCACUGATGGATGAG | 1189 | CCTCAGCGAUGATGCTAUCC | 1190 |
| NM_000424 | AUT | | AG | |
| LMNA | AGCAAAGTGCGUGAGGAGTUT | 1191 | CGCUTCTCACUGAGAGCAGT | 1192 |
| NM_170707 | | | | |
| PTPN11 | GCGGAUGGTGTUCCAAGAAAA | 1193 | GCGCTTTCTUTGACGTTCCU | 1194 |
| NM_002834 | | | AA | |

[0176] RNA and cDNA Preparation

[0177] Total RNA was extracted from samples with the RecoverAll™ Total Nucleic Acid Isolation Kit (Ambion, Inc.), according to the manufacturer instructions, and quantified, e.g., using the Qubit™ RNA HS Assay Kit (Thermo Fisher) for quantifying RNA. A total of 10 ng of total RNA was first reverse transcribed to cDNA with SuperScript® VILO™ cDNA Synthesis Kit (Thermo Fisher, Cat. No. 11754050) according to manufacturer instructions. Prepared template was used to amplify targets with the immune response assay comprising primer pairs in Table 2.

[0178] PCR Amplify RNA Targets

[0179] A multiplex polymerase chain reaction was performed to amplify 398 individual amplicons across a RNA expression sample. A list of genes and the resulting amplicon sequences generated are provided in Table 1. Primer pairs are presented in Table 2. To a single well of a 96-well PCR plate was added 4 microliters of immune response primer pool containing 398 primer pairs at a concentration of 15 μM in TE, 10 microliters prepared cDNA and 4 microliters of an amplification reaction mixture (5× AmpliSeq HiFi Master Mix) that can include glycerol, dNTPs, and Platinum® Taq High Fidelity DNA Polymerase (Invitrogen, Catalog No. 11304) to a final volume of 20 microliters with DNase/RNase Free Water (Life Technologies, CA, Part No. 600004).

[0180] The PCR plate was sealed and loaded into a thermal cycler (GeneAmp® PCR system Dual 96-well thermal cycler (Life Technologies, CA, Part No. N8050200 and 4314445)) and run on the following temperate profile to generate the preamplified amplicon library.

[0181] An initial holding stage was performed at 99° C. for 2 minutes, followed by 19 cycles of denaturing at 99° C. for 15 seconds and an annealing and extending stage at 60° C. for 4 minutes. After cycling, the preamplified amplicon library was held at 10° C. until proceeding.

[0182] Partially Digest Amplicons

[0183] The sample was briefly centrifuged to collect contents before proceeding. To the preamplified amplicon library (˜20 microliters), 2 microliters of FuPa reagent was added. The reaction mixture was sealed, mixed thoroughly to ensure uniformity and incubated at 50° C. for 10 minutes, 55° C. for 10 minutes, 60° C. for 20 minutes, then held at 10° C. for up to 1 hour. The sample was briefly centrifuged to collect contents before proceeding.

[0184] Ligate Adapters to Amplicons and Purify

[0185] After incubation, the reaction mixture proceeded directly to a ligation step. Here, the reaction mixture now containing the phosphorylated amplicon library was combined with 2 microliters of A/P1 Adapters (sold as a component of the Ion Fragment Library Kit, Thermo Fisher), microliters of Switch Solution (sold as a component of the Fragment Library Kit, Thermo Fisher) and 2 microliters of DNA ligase, added last (sold as a component of the Ion Fragment Library Kit, Thermo Fisher), then incubated at the following: 22° C. for 30 minutes, 72° C. for 10 minutes, then held at 10° C. for up to 1 hour. The sample was briefly centrifuged to collect contents before proceeding.

[0186] After the incubation step, 45 microliters (1.5× sample volume) of room temperature AgenCourt® AMPure® Reagent (Beckman Coulter, Calif.) was added to ligated DNA. The mixture was pipetted thoroughly to mix the bead suspension with the ligated DNA. The mixture was pulse-spin and incubated at room temperature for 5 minutes. Samples underwent another pulse-spin and were placed on a magnetic rack such as a DynaMag™-2 spin magnet (Life Technologies, CA, Part No. 123-21D) for two minutes. After the solution had cleared, the supernatant was discarded. Without removing the tube from the magnetic rack, 150 microliters of freshly prepared 70% ethanol was introduced into the sample, and incubated while gently rotating the tube on the magnetic rack. After the solution cleared, the supernatant was discarded without disturbing the pellet. A second ethanol wash was performed and the supernatant discarded. Any remaining ethanol was removed by pulse-spinning the tube and carefully removing residual ethanol while not disturbing the pellet. The pellet was air-dried for about 5 minutes at room temperature.

[0187] The pellet was resuspended in 20 microliters of DNase/RNase Free Water (Life Technologies, CA, Part No. 600004) and vortexed to ensure the sample was mixed thoroughly. The sample was pulse-spin and placed on the magnetic rack for two minutes. After the solution cleared, the supernatant containing the ligated DNA was transferred to a new Eppendorf LoBind™ tube for long-term storage. After quantification, determine the dilution factor that results in a concentration of ˜100 μM, which is suitable for template preparation using an Ion template kit.

[0188] Quantify the Library

[0189] Ligated library was quantified, using a Qubit™ 2.0 or 3.0 Fluorometer and/or by qPCR using the Ion Library TaqMan® Quantitation Kit (Cat. No. 4468802), according to manufacturer instructions.

[0190] Amplify and Purify the Library

[0191] The ligated preamplified library (˜20 microliters) was combined with 50 microliters of Platinum® PCR SuperMix High Fidelity (Thermo Fisher, sold as a component of the Ion Fragment Library Kit) and 2 microliters of Library Amplification Primer Mix (sold as a component of the Ion Fragment Library Kit). The solution was applied to a single well of a 96-well PCR plate and sealed. The plate was loaded into a thermal cycler (GeneAmp® PCR system 9700 Dual 96-well thermal cycler (Life Technologies, CA, Part No. N8050200 and 4314445)) and run on the following temperate profile to generate the final amplicon library: hold at 98° C. for 2 minutes, followed by 5 cycles of denaturing at 98° C. for 15 seconds and an annealing and extending stage at 64° C. for 1 minute. After cycling, the final amplicon library was held at 4° C. until proceeding to the final purification step outlined below.

[0192] A two-round purification of the final library was carried out. 25 μL (0.5× sample volume) of Agencourt™ AMPure™ XP Reagent was added to each plate well containing ˜50 μL of sample. The bead suspension was pipetted up and down to thoroughly mix the bead suspension with the final amplicon library. The sample was then pulse-spun and incubated for 5 minutes at room temperature. The plate containing the final amplicon library was placed on a magnetic rack such as a DynaMag™-side magnet (Thermo Fisher) for 5 minutes to capture the beads. Once the solution cleared, the supernatant was carefully transferred without disturbing the bead pellet. A second round of purification was carried out, adding 60 microliters (1.2× sample volume) of Agencourt™ AMPure™ XP Reagent was added to each plate well containing sample. The bead suspension was pipetted up and down to thoroughly mix the bead suspension and incubated for 5 minutes at room temperature. The plate containing the final amplicon library was placed on a magnetic rack for 3 minutes to capture the beads. Without removing the plate from the magnetic rack, 150 microliters of freshly prepared 70% ethanol was introduced into the beads containing sample. The sample was incubated for 30 seconds while gently rotating the tube on the magnetic rack. After the solution cleared, the supernatant was discarded without disturbing the pellet. A second ethanol wash was performed and the supernatant discarded. Any remaining ethanol was removed by pulse-spinning the tube and carefully removing residual ethanol while not disturbing the pellet. The pellet was air-dried for about 5 minutes at room temperature.

[0193] Once the tube was dry, the tube was removed from the magnetic rack and 50 microliters of Low TE was added (Thermo Fisher), pipetted and vortexed to ensure the sample was mixed thoroughly. The sample was pulse-spin and placed on the magnetic rack for two minutes. After the solution cleared, the supernatant containing the final amplicon library was analyzed using Qubit™ Fluorometer and Qubit™ dsDNA HS Assay Kit according to manufacturer instructions to quantify the library and calculate the dilution factor for template preparation and sequencing. Library was diluted to ˜50 pM for use in template preparation or stored in 1.5-mL Eppendorf LoBind™ tube for long-term storage.

[0194] Template Preparation and Sequencing

[0195] An aliquot of the final library was used in template preparation with either Ion OneTouch™ 2 System or Ion Chef™ instrument according to the manufacturer's instructions.

[0196] Sequencing was performed on either the Ion S5™ System or the Ion PGM™ System. According to manufacturer instructions, and gene expression was quantified with the Ion Torrent Suite™ software subjected to analysis and sequencing according to manufacturer instructions.

[0197] Automated Processes

[0198] Alternatively, automated library prep and templating can be performed using cDNA prepared as described above in conjunction with the Ion AmpliSeg™ Kit for Chef DL8 and Ion Chef™ Instrument according to manufacturer instructions and described in the Ion AmpliSeq Library Preparation on the Ion Chef System (Thermo Fisher Scientific publication number MAN0013432), hereby incorporated by reference.

[0199] Multiple Library Preparation

[0200] When sequencing multiple libraries, a different barcode will be ligated to each library. DNA and RNA libraries from the same sample also require different barcodes. IonCode Adapters are provided at the appropriate concentration and include forward and reverse adapters in a single well. For each barcode selected, prepare a mix of Ion P1 adapter and IonXpress Barcode X (Thermo Fisher) at a final dilution of 1:4 for each adapter. Substitute 2 uL of this barcode adapter mix for the Ion AmpliSeq Adapters in ligation reactions above; and scale volumes as necessary. Multiple barcoded libraries can be sequenced on a single chip by combining equal volumes of each library before template preparation. The manufacturer recommends up to eight libraries for the following chips: Ion 318 Chip v2 (up to 4), Ion 520 Chip (up to 4), Ion 530 Chip (up to 8). A combined library is prepared by diluting all individual libraries to 50 pM concentration; combining 10 uL of each library in a single tube (preferably Eppendorf LoBind tube). After combining the last library, mix thoroughly by pipetting up and down 5 times, then centrifuge briefly to collect in the bottom of the tube. Proceed to templating and sequencing as desired.

[0201] Data Analysis

[0202] Gene expression level quantification is performed using the Torrent Suite™ RNA plugin that produces gene transcript quantification from sequence read data. The plugin utilizes target region .bed file and an associated reference library .fasta file, and optionally accepts a secont .bed file that specifies a subset of target genes allowing sample clustering. Resulting report includes gene expression counts (number of aligned reads to a given target sequence), data analysis summary, and QC plots. Normalized gene level count data can be determined using the Affymetrix Transcriptome Analysis Console (TAC) 3.1 software (Thermo Fisher Scientific). CHP files generated from Torrent Suite™ plugin can be used directly with Transcriptome Analysis Console (TAC³ software for differential gene expression analysis. Affymetrix® Transcriptome Analysis Console (TAC) Software is freely available, http://www.affymetrix.com/

[0203] Normalization of Expression

[0204] To observe how expression profiles among the selected target immune response genes vary within a large cohort of samples, we downloaded and processed more than 9,600 patient samples across 18 cancer studies from the ICGC database [Zhang et al., 2011]. To ensure high-quality RNA profiles, we excluded all samples with a library size less than 20 million reads mapped to the transcriptome and ended up with 9,148 full transcriptome datasets. For this study, we used the log 2 CPM full transcriptome (FT) expression of each gene as the ‘true’ expression value and the total number of reads mapping to genes as the ‘true’ normalizing constant for each sample in the cohort.

[0205] Results

[0206] Total RNA extracted from, samples e.g., NSCLC FFPE samples, were reverse transcribed. Libraries were generated, templated on Ion Chef™ or Ion OneTouch™ 2 System and sequenced on the Ion 55™ or Ion PGM™ System. With an input requirement as low as 10 ng of total RNA, we were able to measure robust expression, including for low expressing transcripts (e.g., IFN, IL2, IL21, IL10, IL23) from samples, e.g., NSCLC FFPE samples, CRC samples. Results show high sensitivity and specificity, with broad dynamic range and great reproducibility. Technical replicates were highly reproducible (see FIG. 1), consistent among various sample types (See FIG. 4), and the assay results were highly specific, with negligible background when tested with gDNA and water control samples in parallel. Dynamic range of the assay was determined, for example, the expression profiles of HL-60 and human lung total RNA were measured individually and mixed at 4 different ratios to evaluate dynamic range (see FIG. 2). Fold changes between pure and mixed samples were correlated, and rank order of fold change correlations between pure and mixed samples were compared. Expected fold change was calculated from pure samples and observed fold change was derived from fitting a line to the mixed samples (see TABLE 3). Ability to realiably detect low expressing markers of the panel was confirmed in replicate experiments carried out in automated and manual workflows, demonstrating consistent results even for very low expressing genes (e.g., IL2, IL21, IL2B, IL13, IL23A, IL10) and higher expressing interleukins (e.g., IL1A, IL12A, IL15, IL6, IL7, IL2RB). Data not shown. Sequencing data from the provided immune response assay also showed high concordance with results from parallel samples using quantitative real-time PCR evaluation (see FIG. 3). A larger concordance study examining results over fifty genes using reference RNA generated similar concordance. Data not shown.

TABLE 3
Sensitivity and specificity for 2-fold
and 4-fold differential expression

| | Observed | Expected | | |
|---|---|---|---|---|
| q_value | fold change | fold change | Sensitivity | Specificity |
| 0.05 | 2 | 2 | 77.5% | 98.5% |
| 0.05 | 4 | 4 | 89.4% | 99.1% |

[0207] Analysis report files include, for example, a sample summary report (table listing each sample, total reads, aligned reads, percent aligned); absolute read count data (absolute reads for genes of each sample), RPM data (normalized by total read count for each sample), mean housekeeping scaled log 2 RPM data (for each sample), CHP files normalized by RPM, CHP files normalized by mean housekeeping genes, and expression data for genomic DNA and water samples. See FIG. 5 and FIG. 6. The analysis output generated data demonstrating distribution of genes showing frequency of genes having similar and differential read counts. See FIG. 5A. Curves are plotted on the same axis scale; and count data is fitted to a Gaussian kernel using the default R ‘density’ function. Expression of housekeeping genes across samples demonstrated similar levels of expression independent of sample type. See FIG. 5B. A heatmap correlation for r-values comparing log 2 RPM reads pair correlation samples, demonstrates correlation across entire expression assay among samples. Sample reads demonstrate correlations across each of the targets for samples. See FIG. 5C. and FIG. 6 (upper panels show Pearson correlation r-values for the regression line; diagonal panels show frequency density plot for the individual log (RPM+1) values for each sample; and lower panels show log 2 RPM+1 values plotted for each barcode pair of the entire panel, with linear least squares regression line overlaid and line slope is reported). Expression levels as measured by read count can also be depicted as a heatmap, depicting the most variation in representation across barcodes as measured by coefficient variation of normalized read counts for genes that have at least one sample with at least 100 RPM reads. For the plot, samples are eliminated if they have less than 10⁵ reads total. An exemplary heatmap analysis demonstrating high and low expression genes across the entire panel is shown in FIG. 7.

[0208] Thus, we verified a linear and unbiased estimate of fold change in our assays across mixing concentrations of a cell-line titration experiment. FIG. 2. By achieving a high correlation (r>0.99) of technical replicates, along with robust expression estimation even at low input amounts (10 ng RNA), our assay offers a valuable solution for biomarker research in cancer immunotherapy.

[0209] Using endogenous controls accurately estimates fold change. When most genes do not change between the samples, the fold change estimate has negligible error. When most genes do change, the fold change estimate is wildly inaccurate. See FIG. 8. Thus, when using endogenous controls, we accurately measure fold change. In silico analysis of gene expression across 9148 samples across cancer types was assessed. See Table 4. Standard CPM normalization was applied to measure the expression of each gene and calculate the resulting fold change. Full transcriptome profiling provides a true estimate of expression presumably because, over the total, only a small number of the 20,000+ genes are expected to be differentially expressed. We assessed both full transcriptome expression data as well as the immune response assay expression data. Although the relative number of genes within the immune response assay subcategory vary, no single category uses a majority of the genes on the entire assay, and multiple gene categories have to change to dominate the proportion of genes of the assay. Although the immune response assay is not as large as the full transcriptome, the relative diversity of uncorrelated gene categories requires differential expression among samples to bias expression estimates. Thus, housekeeping gene normalization provides an effective optimization approach for effective estimates of targeted expression fold change estimates in cases where uncorrelated gene categories are differentially expressed among samples.

[0210] To first understand how assaying only genes from a common function can affect estimate of expression, an assay was made comprising only the 5 genes associated with the Leukocyte Migration category (ITGAL, ITGAM, ITGB7, SELL, VCAM1). Assaying only those genes does not provide an accurate expression estimate. Expanding the assay by 2 Leukocyte Inhibition and 19 TCR co-expression genes (CCR7, CD247, CD3D, CD3E, CD3G, CD6, CD8A, CD8B, CRTAM, GPR18, GRAP2, IKZF3, IL2RB, IL7R, ITK, LAMP3, LCK, PTPRCAP, TIGIT) does not increase the correlation. However, assaying 27 genes from the unrelated Tumor Marker category (AKT1, BRCA1, BRCA2, CDKN2A, EFNA4, EGFR, EGR3, IRS1, KRT5, KRT7, MAPK1, MMP2, MMP9, MYC, NOTCH3, PGF, PTGS2, PTK7, RB1, RPS6, SNAIL SNAI2, TCF7, TP63, TRIM29, TWIST1, ZEB1) or 11 housekeeping (HK) genes (ABCF1, G6PD, GUSB, HMBS, LMNA, LRP1, POLR2A, SDHA, TBP, TFRC, TUBB) improves the correlation with true expression values. See FIG. 9A. HK genes are uncorrelated with each other, however, unlike tumor markers (that are also uncorrelated with each other), HK genes provide low-variance and are able to be measured with high precision. For example, when we compared performance and robustness of various metrics for accurate fold change estimates, we found the geometric mean of housekeeping genes provides a more accurate fold change estimate than a standard CPM calculation (with or without housekeeping genes. See FIG. 9B. Housekeeping genes alone can solely correct expression estimates in small panel assays. Using uncorrelated gene categories also has similar effect to normalization. Furthermore, using the inverse of the sum of only the HK genes as the normalizing factor provides an even stronger correlation than using the sum of all genes on the panel.

TABLE 4
Distribution of samples across cancer types

| Study ID | Cancer Type | Sample Size |
|---|---|---|
| BLCA-US | Bladder Urothelial Cancer | 318 |
| BRCA-US | Breast Cancer | 1195 |
| CESC-US | Cervical Squamous Cell Carcinoma | 264 |
| COAD-US | Colon Adenocarcinoma | 516 |
| HNSC-US | Head and Neck Squamous Cell Carcinoma | 524 |
| KIRC-US | Kidney Renal Clear Cell Carcinoma | 598 |
| KIRP-US | Kidney Renal Papillary Cell Carcinoma | 254 |
| LIHC-US | Liver Hepatocellular carcinoma | 345 |
| LUAD-US | Lung Adenocarcinoma | 543 |
| LUSC-US | Lung Squamous Cell Carcinoma | 473 |
| OV-US | Ovarian Serous Cystadenocarcinoma | 530 |
| PAAD-US | Pancreatic Cancer | 145 |
| PRAD-US | Prostate Adenocarcinoma | 870 |
| READ-US | Rectum Adenocarcinoma | 163 |
| SKCM-US | Skin Cutaneous melanoma | 868 |
| STAD-US | Gastric Adenocarcinoma | 900 |
| THCA-US | Head and Neck Thyroid Carcinoma | 566 |
| UCEC-US | Uterine Corpus Endometrial Carcinoma | 541 |

[0211] Thus, we also found that normalization using endogenous controls (housekeeping genes) provides accurate fold change estimates for small panel assays with highly-correlated genes. Uncorrelated gene categories can have the same effect as house-keeping genes on normalization, however, close cases where uncorrelated gene categories are differentially expressed between samples will bias expression estimates when not using housekeeping genes. The method of housekeeping gene normalization provided herein can improve correlation with true values of expression assays. In particular, housekeeping gene normalization may improve assessment of expression in sub-panels of the provided immune response assay, and may be useful in connection with the relatively large immune response assay provided herein.

[0212] From the previous analysis, it is clear that normalization using housekeeping genes in conjunction with compositions and methods of the invention are necessary for accurately estimating fold change expression. It is also clear that using only the housekeeping genes to calculated a normalizing constant is a preferred way to estimate gene expression for accurate fold change estimation. An important factor to using housekeeping genes for calculating normalizing constant is to determine which is metric of the gene counts provides the most accurate fold change estimates. We thus compared 6 metrics across 18 cancer studies; for each study we calculate the log 10 of the total counts and determine the correlation to the following metrics: log 10 of the sum of housekeeping counts (analogous to RPM normalization), log 10 of the geometric mean of the housekeeping counts, the median of the log 10 of housekeeping counts, the 75^{th} quantile of the log 10 of housekeeping counts, and the trimmed mean (15% and 25% of the log 10 of HK counts). Interestingly, the sum of housekeeping counts does not provide an optimal correlation value, instead the geometric mean provides the highest average correlation and number of cancers where the R-squared is greater than 0.5 (data not shown). Of the more robust measures, the 15% trimmed mean provides the highest average R-squared. To further estimate which metric is most robust, we simulate a dropout of a random housekeeping genes for every sample by setting a random housekeeping gene of each sample to have 0 reads. We then reproduce the same analysis to compare the various metrics using dropout samples. Interestingly, the geometric mean still provides the highest correlation with the full transcriptome normalizing constant even in the dropout samples, while the 15% trimmed mean also shows high performances (data not shown). This suggests that the geometric mean is an optimal metric due to its high correlation with the true normalizing constant values and its robustness to dropouts. Additionally, we carried out analysis of normalizing constant, correlations and drop out correlation among various cancer types of interest and confirmed even across various sample types the housekeeping set of genes provided in the instant compositions and methods performed consistently across populations of interest.

[0213] Housekeeping (HK) constant:
[0214] Let x be a vector of counts for every gene on the immune response assay and let HKgenes be the set of housekeeping genes; add a pseudocount 1 to every entry in the vector x, creating a new vector y.
[0215] Find the geometric mean of the counts of housekeeping genes, calculated as 10\hat{ }mean (log 10(y_HKgenes)), where y_HKgenes is a subset of the y vector to only include the counts associated with the housekeeping genes. This geometric mean value will be denoted asHKnorm.
[0216] Multiply each entry of y by the (10\hat{ }6/HKnorm), creating a new vector z.
[0217] Finally take the log 2 value of each entry in z and add, creating the final housekeeping gene normalized expression estimate.

[0218] Once established, an HKnorm constant was calculated by taking the geometric mean of our 11 housekeeping genes and comparing our normalizing strategy to a standard RNA-seq RPM measurement using the 398 genes of the provided immune response assay. Since this assay is made up of a relatively large number of genes that are on average uncorrelated to each other, one could make a valid argument that housekeeping genes are unnecessary to the assay and do not provide additional information. To address this concern, we compared the HKnorm constant against the standard RPM constant and the RPM constant when housekeeping genes are removed from the assay. We first evaluated how these normalizing strategies compare to the full transcriptome constant across all samples, where we found that removing housekeeping genes led to decrease in the correlation of the RPM constant compared to a standard RPM calculation, however, even the standard RPM calculation under-performs when compared to HKnorm. (data not shown). We then examined which normalizing strategy would be optimal for each cancer study that we evaluated, and found that HKnorm largely outperforms the RPM strategies across all studies except for LIHC-US, where no normalization strategy does particularly well and all the strategies produce equivalent results. When looking at the performance each strategy across target genes on the immune response assay of the invention, we see that HKnorm outperforms the RPM strategies in all genes, as expected. Interestingly, genes with smaller variance have a smaller correlation to their FT values than those with higher variance. See FIG. 9B. Furthermore, genes with low expression and those with high average expression also have smaller correlation values than those closer to the mean of average expression values (data not shown).

### REFERENCES

[0219] Schalper K A, et al. Objective measurement and clinical significance of TILs in non-small cell lung cancer. J Natl Cancer Inst. 2015 Feb. 3; 107(3).
[0220] Padmanee S, et al. Immune Checkpoint Targeting in Cancer Therapy: Toward Combination Strategies with Curative Potential. Cell 2015 April 161(2):205-214.
[0221] Love M, Huber W, Anders S. Moderated estimation of fold change and dispersion for RNA-seq data with DESeq2. Genome Biology, 2014.
[0222] Law C, Chen Y, Shi W, Smyth G. voom: precision weights unlock linear model analysis tools for RNA-seq read counts. Genome Biology, 2014.
[0223] Hansen K, Irizarry R. Removing technical variability in RNA-seq data using conditional quantile normalization. Biostatistics, 2011.
[0224] Risso D, Schwartz K, Sherlock G and Dudoit S. GC-Content Normalization for RNA-Seq Data. BMC Bioinformatics, 2011.
[0225] Zhang, J., Baran, J., Cros, A., Guberman, J. M., Haider, S., Hsu, J. Kasprzyk, A. (2011). International Cancer Genome Consortium Data Portal—a one-stop shop for cancer genomics data. Database: The Journal of Biological Databases and Curation, 2011.

1-20. (canceled)

21. A method for determining immune response activity in a biological sample, comprising:
multiplex amplification of a plurality of target sequences from the biological sample, wherein the amplification comprises contacting at least a portion of the sample with a plurality of sets of primer pair reagents and a polymerase under amplification conditions, wherein the plurality of target sequences are selected from the group consisting of the following functions: checkpoint pathways, T cell related signaling pathways, markers of tumor infiltrating lymphocytes (TILs), and tumor markers, and housekeeping genes, and wherein the plurality of primer pair reagents are selected from the group consisting of SEQ ID NOs: 399-1194, thereby producing amplified immune response target sequences; and
detecting a level of expression of each of the plurality of immune response target sequences, wherein a change in the level of expression of one or of the immune response target sequences as compared with a control sample determines a change in immune response activity in the sample.

22. The method of claim 21, wherein the immune response target sequences are from target genes selected from the group consisting of immune checkpoint pathways and targets; T and B cell signaling genes, markers of lymphocyte subsets, interferon signaling genes, cytokine signaling genes; tumor markers, tumor antigens, proliferation markers; and housekeeping genes.

23. The method of claim 22, wherein the target genes are selected from the genes of CD63, CD69, CXCL1, KLRD1, HLA-DOB, CXCR5, IL12B, PTK7, CEACAM1, CXCL9, IL13, NT5E, VEGFA, ABCF1, D38, JAML, S100A8, MYC, IRF1, CCL22, CXCR2, IFIT1, IFIT2, CD68, M6PR, SH2D1A, ISG20, GBP1, TBP, STAT6, ID3, CX3CL1, KLRB1, TNFSF4, CD52, IL10RA, HLA-DOA, IFNB1, CCR5, IKZF3, STAT1, CD6, BRCA1, CORO1A, TBX21, KLRK1, CXCR6, PTEN, PMEL, DMBT1, IFI44L, LAPTM5, CD226, TNFSF13B, ICOS, CD160, TRIM29, LST1, ZBTB46, VTCN1, KREMEN1, PDCD1LG2, TUBB, CLEC4C, CD86, HAVCR2, GZMH, NFATC1, CD8B, BCL2, GADD45GIP1, CBLB, ITGA1, CD8A, IL2RA, EIF2AK2, MADCAM1, PTPN6, LRG1, ADGRE5, SH2D1B, ITGB2, HLA-DPA1, DGAT2, IGF1R TAGAP, LMNA, NCAM1, TIGIT, IL17F, HLA-F-AS1, CD247, CD79B, IDO2, IL4, TYROBP, BTLA, AKT1, IL2RG, POLR2A, ITGAX, IL1B, CSF2RB, DDX58, KIAA0101, CD274, LAMPS, TNFAIP8, FOXP3, IL12A, SAMHD1, SIT1, CD3E, ICOSLG, HGF, MELK, IGSF6, GNLY, TDO2, KRT7, HLA-E, HLADMA, LAMP1, NTN3, CD28, TARP, EGFR, CCR4, MAGEA3, BATF, KLRG1, IRS1, CSF1R, CTLA4, TNFSF18, POU2AF1, GZMA, PIK3CA, ITK, IFI27, EOMES, LCN2, CD80, CD83, CXCL13, MTOR, FCER1G, TFRC, RORC, MMP9, BST2, PIK3CD, FCGR2B, TNFRSF14, OAS3, GRAP2, CCNB2, MLANA, MAGEA12, VCAM1, CDKN3, NCR1, FAS, GZMB, IRF9, IFITM2, TNFSF14, HLA-B, SDHA, NRP1, EBB, EFNA4, PVR BUB1, SKAP2, PRF1, CCL20, TNFRSF18, CTSS, NKG7, ISG15, PDCD1, SNAI1, CXCL11, CIITA, IFI35, TNFSF9, TNFSF10, MMP2, EGR3, MAGEA1, CD163, IL6, KLRF1, B3GAT1, C1QA, OAS1, IKZF2, TLR9, KLF2, GUSB, NFKBIA, IL23A, HERC6, SLAMF8, IL15, TLR7, OAS2, HLA-DRA, CRTAM, MAGEC2, ICAM1, CD4, MAPK14, C1QB, NOTCH3, NCR3, STAT3, TLR8, CYBB, IKZF4, IFIH1, LCK, BCL2L11, ITGAM, ITGB7, JCHAIN, CD209, SLAMF7, IL10, IL1A, FCGR3A, IFNA17, EGR2, TOP2A, C10orf54, FOXM1, AXL, MS4A1, IFI6, CD3D, GPR18, CD3G, ZAP70, HMBS, IL7, IFIT3, RBI, PTGS2, TGFB1, NCF1, TWIST1, CA4, SELL, LILRB1, CD14, ALOX15B, PECAM1, NOS2, FASLG, CD44, ENTPD1, CMKLR1, CD53, TNF, CXCL8, CD40LG, HLA-F, GATA3, LYZ, ARG1, IL2RB, NECTIN2, MPO, CCR2, BRCA2, ADORA2A, G6PD, TAP1, MXI, HLA-DQB2, CD27, CD276, STAT4, PTPN7, PTPRC, PSMB9, CD244, CXCR4, MAPK1, TP63, IRF4, CCL3, CCL18, IL7R, HLA-DRB1, CEACAM8, CXCL10, CCL2, SRGN, CD19, ITGB1, IFITM1, CCL21, MRC1, PGF, ITGAL, ID2, CD22, CCL17, ITGAE, IL3RA, CCR7, CD1C, MAD2L1, PYGL, CD40, LY9, HLA-G, TLR3, CD48, STAT5A, FCRLA, BCL6, ZEB1, CCL5, IDOL IL18, TNFRSF9, HIF1A, HLA-DPB1, FOXO1, CD33, S100A9, HLA-DMB, HLAA, SNAI2, TNFRSF17, LRP1, MAGEA4, HLA-DQA1, CD1D, RPS6, MKI67, GZMK, CD79A, CD37, FUT4, AIF1, CCR1, PRDM1, CD47, CD74, LAGS, TNFRSF4, CD2, CCL4, BAGE, LEXM, CCR6, CD70, CDK1, CTAG1B, CTAG2, CX3CR1, GAGE1, GAGE121, GAGE12F, GAGE12J, GAGE2C, GAGE2A, GAGE2E, GAGE10, GAGE13, IKZF1, IL17A, IL2, IL21, IL22, KIR2DL2, KIR2DL3, MAGEA10, MIF, PTPRCAP, SSX2, TCF7, XAGE1B, CXCR3, FCGR1A, FCGR3B, FYB, HLA-C, HLA-DQA2, IFNG, KIR2DL1, KRT5, and PTPN11.

24. The method of claim 23, wherein the target genes comprise the genes of CD63, CD69, CXCL1, KLRD1, HLA-DOB, CXCR5, IL12B, PTK7, CEACAM1, CXCL9, IL13, NT5E, VEGFA, ABCF1, D38, JAML, S100A8, MYC, IRF1, CCL22, CXCR2, IFIT1, IFIT2, CD68, M6PR, SH2D1A, ISG20, GBP1, TBP, STAT6, ID3, CX3CL1, KLRB1, TNFSF4, CD52, IL10RA, HLA-DOA, IFNB1, CCR5, IKZF3, STAT1, CD6, BRCA1, CORO1A, TBX21, KLRK1, CXCR6, PTEN, PMEL, DMBT1, IFI44L, LAPTM5, CD226, TNFSF13B, ICOS, CD160, TRIM29, LST1, ZBTB46, VTCN1, KREMEN1, PDCD1LG2, TUBB, CLEC4C, CD86, HAVCR2, GZMH, NFATC1, CD8B, BCL2, GADD45GIP1, CBLB, ITGA1, CD8A, IL2RA, EIF2AK2, MADCAM1, PTPN6, LRG1, ADGRE5, SH2D1B, ITGB2, HLA-DPA1, DGAT2, IGF1R TAGAP, LMNA, NCAM1, TIGIT, IL17F, HLA-F-AS1, CD247, CD79B, IDO2, IL4, TYROBP, BTLA, AKT1, IL2RG, POLR2A, ITGAX, IL1B, CSF2RB, DDX58, KIAA0101, CD274, LAMPS, TNFAIP8, FOXP3, IL12A, SAMHD1, SIT1, CD3E, ICOSLG, HGF, MELK, IGSF6, GNLY, TDO2, KRT7, HLA-E, HLADMA, LAMP1, NTN3, CD28, TARP, EGFR, CCR4, MAGEA3, BATF, KLRG1, IRS1, CSF1R, CTLA4, TNFSF18, POU2AF1, GZMA, PIK3CA, ITK, IFI27, EOMES, LCN2, CD80, CD83, CXCL13, MTOR, FCER1G, TFRC, RORC, MMP9, BST2, PIK3CD, FCGR2B, TNFRSF14, OAS3, GRAP2, CCNB2, MLANA, MAGEA12, VCAM1, CDKN3, NCR1, FAS, GZMB, IRF9, IFITM2, TNFSF14, HLA-B, SDHA, NRP1, EBB, EFNA4, PVR BUB1, SKAP2, PRF1, CCL20, TNFRSF18, CTSS, NKG7, ISG15, PDCD1, SNAI1, CXCL11, CIITA, IFI35, TNFSF9, TNFSF10, MMP2, EGR3, MAGEA1, CD163, IL6, KLRF1, B3GAT1, C1QA, OAS1, IKZF2, TLR9, KLF2, GUSB, NFKBIA, IL23A, HERC6, SLAMF8, IL15, TLR7, OAS2, HLA-DRA, CRTAM, MAGEC2, ICAM1, CD4, MAPK14, C1QB, NOTCH3, NCR3, STAT3, TLR8, CYBB, IKZF4, IFIH1, LCK, BCL2L11, ITGAM, ITGB7, JCHAIN, CD209, SLAMF7, IL10, IL1A, FCGR3A, IFNA17, EGR2, TOP2A, C10orf54, FOXM1, AXL, MS4A1, IFI6, CD3D, GPR18, CD3G, ZAP70, HMBS, IL7, IFIT3, RBI, PTGS2, TGFB1, NCF1, TWIST1, CA4, SELL, LILRB1, CD14, ALOX15B, PECAM1, NOS2, FASLG, CD44, ENTPD1, CMKLR1, CD53, TNF, CXCL8, CD40LG, HLA-F, GATA3, LYZ, ARG1, IL2RB, NECTIN2, MPO, CCR2, BRCA2, ADORA2A, G6PD, TAP1, MXI, HLA-DQB2, CD27, CD276, STAT4, PTPN7, PTPRC, PSMB9, CD244, CXCR4, MAPK1, TP63, IRF4, CCL3, CCL18, IL7R, HLA-DRB1, CEACAM8, CXCL10, CCL2, SRGN, CD19, ITGB1, IFITM1, CCL21, MRC1, PGF, ITGAL, ID2, CD22, CCL17, ITGAE, IL3RA, CCR7, CD1C, MAD2L1, PYGL, CD40, LY9, HLA-G, TLR3, CD48, STAT5A, FCRLA, BCL6, ZEB1, CCL5, IDOL IL18, TNFRSF9, HIF1A, HLA-DPB1, FOXO1, CD33, S100A9, HLA-DMB, HLAA, SNAI2, TNFRSF17, LRP1, MAGEA4, HLA-DQA1, CD1D, RPS6, MKI67, GZMK, CD79A, CD37, FUT4, AIF1, CCR1, PRDM1, CD47, CD74, LAGS, TNFRSF4, CD2, CCL4, BAGE, LEXM, CCR6, CD70, CDK1, CTAG1B, CTAG2, CX3CR1, GAGE1, GAGE121, GAGE12F, GAGE12J, GAGE2C, GAGE2A, GAGE2E, GAGE10, GAGE13, IKZF1, IL17A, IL2, IL21, IL22, KIR2DL2, KIR2DL3, MAGEA10, MIF, PTPRCAP, SSX2, TCF7, XAGE1B, CXCR3, FCGR1A, FCGR3B, FYB, HLA-C, HLA-DQA2, IFNG, KIR2DL1, KRT5, and PTPN11.

25. The method of claim 21, wherein the plurality of immune response target sequences comprise a plurality of amplicon sequences selected from SEQ ID NOs: 1-398.

26. The method of claim 25, wherein the plurality of target sequences comprises each of the amplicon sequences of SEQ ID NOs: 1-398.

27. The method of claim 26, wherein the plurality of target sequences consists of each of the amplicon sequences of SEQ ID NOs: 1-398.

28. The method of claim 21, wherein the plurality of primer pair reagents comprises each of the primer pairs of SEQ ID NOs: 399-1194.

29. The method of claim 28, wherein the plurality of primer pair reagents consists of each of the primer pairs of SEQ ID NOs: 399-1194.

30. The method of claim 21, wherein the one or more housekeeping genes are selected from ABCF1, G6PD, GUSB, HMBS, LMNA, LRP1, POLR2A, SDHA, TBP, TFRC, and TUBB.

31. The method of claim 21, wherein the biological sample comprises a tumor, tissue surrounding a tumor, or both.

32. The method of claim 21, wherein the biological sample and the control sample are from the same individual.

The application's sequence listing, which the Patent Office published only in electronic form, follows.

SEQUENCE LISTING (1194 sequences)

SEQ ID NO: 1 - DNA, 108 bp, synthetic construct
  misc_feature 1..108: note = synthetic sequence
  source 1..108: mol_type = other DNA
cccgactcctgctgcattaatgttactgtgggctgtgggattaatttcaacgagaaggcgatccataaggagggctgtgtggagaagattgggggctggctgaggaaa

SEQ ID NO: 2 - DNA, 108 bp, synthetic construct
  misc_feature 1..108: note = synthetic sequence
  source 1..108: mol_type = other DNA
gttcctgtcctgtgtgctgtaatgaatgtggtcttcatcaccattttaatcatagctctcattgccttatcagtgggccaatacaattgtccaggccaatacacattc

SEQ ID NO: 3 - DNA, 102 bp, synthetic construct
  misc_feature 1..102: note = synthetic sequence
  source 1..102: mol_type = other DNA
taagaaaatcatcgaaaagatgctgaacagtgacaaatccaactgaccagaagggaggaggaagctcactggtggctgttcctgaaggaggccctgccctta

SEQ ID NO: 4 - DNA, 104 bp, synthetic construct
  misc_feature 1..104: note = synthetic sequence
  source 1..104: mol_type = other DNA
cggcatctctgtgcttctcagaaatccagcctgcttcagcttcaaaacacagatgaactggattttatgagctccagtcaacaattttactggattggactctc

SEQ ID NO: 5 - DNA, 108 bp, synthetic construct
  misc_feature 1..108: note = synthetic sequence
  source 1..108: mol_type = other DNA
ctccagaagattttgtgattcaggcaaaggctgactgttacttcaccaacgggacagaaaaggtgcagtttgtggtcagattcatctttaacttggaggagtatgtac

SEQ ID NO: 6 - DNA, 99 bp, synthetic construct
  misc_feature 1..99: note = synthetic sequence
  source 1..99: mol_type = other DNA
ggtgactcacagccggcacagccatgaactacccgctaacgctggaaatggacctcgagaacctggaggacctgttctgggaactggacagattggaca

SEQ ID NO: 7 - DNA, 108 bp, synthetic construct
  misc_feature 1..108: note = synthetic sequence
  source 1..108: mol_type = other DNA
caaaggaggcgaggttctaagccattcgctcctgctgcttcacaaaaaggaagatggaatttggtccactgatattttaaaggaccagaaagaacccaaaaataagac

SEQ ID NO: 8 - DNA, 109 bp, synthetic construct
  misc_feature 1..109: note = synthetic sequence
  source 1..109: mol_type = other DNA
ttgcctgacccaggccacaccaaaacctacagttgtctggtacagaaaccagatgctcatctcagaggactcacggttcgaggtcttcaagaatgggaccttgcgcatc

SEQ ID NO: 9 - DNA, 108 bp, synthetic construct
  misc_feature 1..108: note = synthetic sequence
  source 1..108: mol_type = other DNA
gtcactggctgcaacaggaccacagtcaagacgatcatagtcactgagctaagtccagtagtagcaaagccccaaatcaaagccagcaagaccacagtcacaggagat

SEQ ID NO: 10 - DNA, 101 bp, synthetic construct
  misc_feature 1..101: note = synthetic sequence
  source 1..101: mol_type = other DNA
ccaagggactatccacctacaatccttgaaagaccttaaacaatttgccccaagcccttcctgcgagaaaattgaaatcattgctacactgaagaatggag

SEQ ID NO: 11 - DNA, 110 bp, synthetic construct
  misc_feature 1..110: note = synthetic sequence
  source 1..110: mol_type = other DNA
caacgtgtcaggctgcagtgccatcgagaagacccagaggatgctgagcggattctgcccgcacaaggtctcagctgggcagttttccagcttgcatgtccgagacacca

SEQ ID NO: 12 - DNA, 102 bp, synthetic construct
  misc_feature 1..102: note = synthetic sequence
  source 1..102: mol_type = other DNA
tgaggggtgtggacgtcgtggtgggaggacactccaacacatttctttacacaggcaatccaccttccaaagaggtgcctgctgggaagtacccattcatag

SEQ ID NO: 13 - DNA, 105 bp, synthetic construct
  misc_feature 1..105: note = synthetic sequence
  source 1..105: mol_type = other DNA
cagatgtgacaagccgaggcggtgagccgggcaggaggaaggagcctccctcagggtttcgggaaccagatctctcaccaggaaagactgatacagaacgatcga

SEQ ID NO: 14 - DNA, 109 bp, synthetic construct
  misc_feature 1..109: note = synthetic sequence
  source 1..109: mol_type = other DNA
tgatgtgttgctgtgtgagcaggaggtggtagcagatgagacaccagcagtccaggctgttcttcgagctgacaccaagcgattgaagctgctggaagaggagcggcgg

SEQ ID NO: 15 - DNA, 109 bp, synthetic construct
  misc_feature 1..109: note = synthetic sequence
  source 1..109: mol_type = other DNA
tccagcgggacatgttcaccctggaggacacgctgctaggctaccttgctgatgacctcacatggtgtggtgaattcaacacttccaaaataaactatcaatcttgccc

SEQ ID NO: 16 - DNA, 110 bp, synthetic construct
  misc_feature 1..110: note = synthetic sequence
  source 1..110: mol_type = other DNA
ctttcagttgagcttggggactgcagctgtggggagatttcagtgcattgcctcccctgggtgctcttcatcttggatttgaaagttgagagcagcatgttttgcccact

SEQ ID NO: 17 - DNA, 95 bp, synthetic construct
  misc_feature 1..95: note = synthetic sequence
  source 1..95: mol_type = other DNA
gggaatttccatgccgtctacagggatgacctgaagaaattgctagagaccgagtgtcctcagtatatcaggaaaaagggtgcagacgtctggtt

SEQ ID NO: 18 - DNA, 109 bp, synthetic construct
  misc_feature 1..109: note = synthetic sequence
  source 1..109: mol_type = other DNA
gcagctgcttagacgctggatttttttcgggtagtggaaaaccagcagcctcccgcgacgatgcccctcaacgttagcttcaccaacaggaactatgacctcgactacg

SEQ ID NO: 19 - DNA, 109 bp, synthetic construct
  misc_feature 1..109: note = synthetic sequence
  source 1..109: mol_type = other DNA
ggaggtggagcaggccctgactccagcactgtcgccatgtgctgtcagcagcactctccccgactggcacatcccagtggaagttgtgccggacagcaccagtgatctg

SEQ ID NO: 20 - DNA, 106 bp, synthetic construct
  misc_feature 1..106: note = synthetic sequence
  source 1..106: mol_type = other DNA
gctgtggcgcttcaagcaactgaggcaggcccctacggcgccaacatggaagacagcgtctgctgccgtgattacgtccgttaccgtctgcccctgcgcgtggtga

SEQ ID NO: 21 - DNA, 107 bp, synthetic construct
  misc_feature 1..107: note = synthetic sequence
  source 1..107: mol_type = other DNA
agcccagcgacccagtcaggatttaagtttacctcaaaaatggaagattttaacatggagagtgacagctttgaagatttctggaaaggtgaagatcttagtaatta

SEQ ID NO: 22 - DNA, 101 bp, synthetic construct
  misc_feature 1..101: note = synthetic sequence
  source 1..101: mol_type = other DNA
acagcaaccatgagtacaaatggtgatgatcatcaggtcaaggatagtctggagcaattgagatgtcactttacatgggagttatccattgatgacgatga

SEQ ID NO: 23 - DNA, 100 bp, synthetic construct
  misc_feature 1..100: note = synthetic sequence
  source 1..100: mol_type = other DNA
gcagctgcctgaaccgagccctgccgaacagctgagaattgcactgcaaccatgagtgagaacaataagaattccttggagagcagcctacggcaactaa

SEQ ID NO: 24 - DNA, 108 bp, synthetic construct
  misc_feature 1..108: note = synthetic sequence
  source 1..108: mol_type = other DNA
tgggtgaggcggttcagccatgaggctggctgtgcttttctcgggggccctgctggggctactggcagcccaggggacagggaatgactgtcctcacaaaaaatcagc

SEQ ID NO: 25 - DNA, 107 bp, synthetic construct
  misc_feature 1..107: note = synthetic sequence
  source 1..107: mol_type = other DNA
tcactggggattctgagctttggctactccagtttcccacgacacgatgttccctttctacagctgctggaggactggactgctactactactcctggctgtggcag

SEQ ID NO: 26 - DNA, 102 bp, synthetic construct
  misc_feature 1..102: note = synthetic sequence
  source 1..102: mol_type = other DNA
aacaggttcttggagtgctgagacagcacctggggtacataaaagatatttccggaaaataaaaaatctcatttcagcatttcagaagccagatcaaggcat

SEQ ID NO: 27 - DNA, 108 bp, synthetic construct
  misc_feature 1..108: note = synthetic sequence
  source 1..108: mol_type = other DNA
ggcgtgaggccaagctggaccactgcaggcgtgtctccctgcgggtgctgagtgagcgcctcctgcacaagagcatccagaacagcctgcttggacacagctcggtgg

SEQ ID NO: 28 - DNA, 101 bp, synthetic construct
  misc_feature 1..101: note = synthetic sequence
  source 1..101: mol_type = other DNA
tttctccctggacttggaagcagatggacaacccctcacaccagatgagtacctgacatactccctgaagctgaagaaaggtaccagtcaaaaagatgaaa

SEQ ID NO: 29 - DNA, 108 bp, synthetic construct
  misc_feature 1..108: note = synthetic sequence
  source 1..108: mol_type = other DNA
ccaagaagaaagtgaacatcatggatcagaacaacagcctgccaccttacgctcagggcttggcctcccctcagggtgccatgactcccggaatccctatctttagtc

SEQ ID NO: 30 - DNA, 108 bp, synthetic construct
  misc_feature 1..108: note = synthetic sequence
  source 1..108: mol_type = other DNA
ggggcctggaagtgcccgctgagaaagggagaagacagcagaggggttgccgaggcaacctccaagtcccagatcatgtctctgtggggtctggtctccaagatgccc

SEQ ID NO: 31 - DNA, 106 bp, synthetic construct
  misc_feature 1..106: note = synthetic sequence
  source 1..106: mol_type = other DNA
atcctacagcgcgtcatcgactacattctcgacctgcaggtagtcctggccgagccagcccctggaccccctgatggcccccaccttcccatccagacagccgagc

SEQ ID NO: 32 - DNA, 108 bp, synthetic construct
  misc_feature 1..108: note = synthetic sequence
  source 1..108: mol_type = other DNA
aagatacctgtagctttgctcatccactatcaacagaaccaggcatcatgcggcaaacgcgcaatcatcttggagacgagacagcacaggctgttctgtgccgacccg

SEQ ID NO: 33 - DNA, 107 bp, synthetic construct
  misc_feature 1..107: note = synthetic sequence
  source 1..107: mol_type = other DNA
ttgccctgaaacttagctgtgctgggattattctccttgtcttggttgttactgggttgagtgtttcagtgacatccttaatacagaaatcatcaatagaaaaatgc

SEQ ID NO: 34 - DNA, 92 bp, synthetic construct
  misc_feature 1..92: note = synthetic sequence
  source 1..92: mol_type = other DNA
acaatttaccgaatataagaaggagaaaggtttcatcctcacttcccaaaaggaggatgaaatcatgaaggtgcagaacaactcagtcatca

SEQ ID NO: 35 - DNA, 105 bp, synthetic construct
  misc_feature 1..105: note = synthetic sequence
  source 1..105: mol_type = other DNA
ccaagacagccacgaagatcctaccaaaatgaagcgcttcctcttcctcctactcaccatcagcctcctggttatggtacagatacaaactggactctcaggaca

SEQ ID NO: 36 - DNA, 104 bp, synthetic construct
  misc_feature 1..104: note = synthetic sequence
  source 1..104: mol_type = other DNA
tccaccacatcctccactggacacccatcccaaatcagtctgaaagtacctgctatgaagtggcgctcctgaggtatggaatagagtcctggaactccatctcc

SEQ ID NO: 37 - DNA, 108 bp, synthetic construct
  misc_feature 1..108: note = synthetic sequence
  source 1..108: mol_type = other DNA
tgattaaagcaccagagtgtaatggccctcagagcagggctggtcctggggttccacaccctgatgaccctcctgagcccgcaggaggcaggggccaccaaggctgac

SEQ ID NO: 38 - DNA, 107 bp, synthetic construct
  misc_feature 1..107: note = synthetic sequence
  source 1..107: mol_type = other DNA
gtggaaatcctaaggaacttttacttcattaacagacttacaggttacctccgaaactgaagatctcctagcctgtgcctctgggactggacaattgcttcaagcat

SEQ ID NO: 39 - DNA, 108 bp, synthetic construct
  misc_feature 1..108: note = synthetic sequence
  source 1..108: mol_type = other DNA
cgttcccctacaagaaactctccccgggtggaacaagatggattatcaagtgtcaagtccaatctatgacatcaattattatacatcggagccctgccaaaaaatcaa

SEQ ID NO: 40 - DNA, 107 bp, synthetic construct
  misc_feature 1..107: note = synthetic sequence
  source 1..107: mol_type = other DNA
gtgtggattatcctgcatcagcttcaatgtcttaatggttcataagcgaagccatactggtgaacgcccattccagtgtaatcagtgtggggcatcttttactcaga

SEQ ID NO: 41 - DNA, 109 bp, synthetic construct
  misc_feature 1..109: note = synthetic sequence
  source 1..109: mol_type = other DNA
agtgctgagttggcagttttcttctgtcaccaaaagaggtctcaatgtggaccagctgaacatgttgggagagaagcttcttggtcctaacgccagccccgatggtctc

SEQ ID NO: 42 - DNA, 109 bp, synthetic construct
  misc_feature 1..109: note = synthetic sequence
  source 1..109: mol_type = other DNA
gcaggttccagatgccacccttggaggaaggacttgaagagttgcatgcctcccacatcccaactgccaaccctggacactgcattacagacccgccatccctgggccc

SEQ ID NO: 43 - DNA, 104 bp, synthetic construct
  misc_feature 1..104: note = synthetic sequence
  source 1..104: mol_type = other DNA
ctgagtgacaaggaattggtttcagatgatgaagaaagaggaacgggcttggaagaaaataatcaagaagagcaaagcatggattcaaacttaggtgaagcagc

SEQ ID NO: 44 - DNA, 106 bp, synthetic construct
  misc_feature 1..106: note = synthetic sequence
  source 1..106: mol_type = other DNA
ggccctgatctgtgaggccagcgggggaggggccttcctggtgctgcccctgggcaagactggacgtgtggacaagaatgcgcccacggtctgtggccacacagcc

SEQ ID NO: 45 - DNA, 111 bp, synthetic construct
  misc_feature 1..111: note = synthetic sequence
  source 1..111: mol_type = other DNA
tttgggaaactaaagctcacaaacaacaagggggcgtccaacaatgtgacccagatgattgtgctccagtccctccataagtaccagccccggctgcatatcgttgaggtg

SEQ ID NO: 46 - DNA, 106 bp, synthetic construct
  misc_feature 1..106: note = synthetic sequence
  source 1..106: mol_type = other DNA
ctcacccaacctactaacaataattgaaatgcagaagggagactgtgcactctatgcctcgagctttaaaggctatatagaaaactgttcaactccaaatacgtac

SEQ ID NO: 47 - DNA, 105 bp, synthetic construct
  misc_feature 1..105: note = synthetic sequence
  source 1..105: mol_type = other DNA
gcatctctgctggtgttcatcagaacagacaccatggcagagcatgattaccatgaagactatgggttcagcagtttcaatgacagcagccaggaggagcatcaa

SEQ ID NO: 48 - DNA, 105 bp, synthetic construct
  misc_feature 1..105: note = synthetic sequence
  source 1..105: mol_type = other DNA
tatctagtacttactttaacaaaaaatgatcttgacaaagcaaataaagacaaagccaaccgatacttttctccaaattttaaggtgaagctgtacttcacaaaa

SEQ ID NO: 49 - DNA, 106 bp, synthetic construct
  misc_feature 1..106: note = synthetic sequence
  source 1..106: mol_type = other DNA
ccagagtggacagaagcccagagacttgactgctggagaggtggtcaagtgtccctcaaggtcagtaatgatgggcctacactgattggtgcaaatgcctccttct

SEQ ID NO: 50 - DNA, 106 bp, synthetic construct
  misc_feature 1..106: note = synthetic sequence
  source 1..106: mol_type = other DNA
agcaccaacctgctctgtctgccaaatcacatgcaagccagtgtgagcaggagctatctccaatccttgggcttttctgccagtgaccttgtcatttccacctgga

SEQ ID NO: 51 - DNA, 99 bp, synthetic construct
  misc_feature 1..99: note = synthetic sequence
  source 1..99: mol_type = other DNA
cttcaagacaactttttaaacatgagtagatctatgacttctcaaagccgggtcatgaatgtccataaaatgctaggcattcctatttccaatattttg

SEQ ID NO: 52 - DNA, 109 bp, synthetic construct
  misc_feature 1..109: note = synthetic sequence
  source 1..109: mol_type = other DNA
catggaagtgcccacctatctcaacttcaagtccatgaaccacatgaattacctccccagccaggaggatatgcctcataaccagttcatcaagatgatgatcatcttt

SEQ ID NO: 53 - DNA, 104 bp, synthetic construct
  misc_feature 1..104: note = synthetic sequence
  source 1..104: mol_type = other DNA
gtcacagtctcagactcggggctttaccgctgctacttgcaggccagcgcaggagaaaacgaaaccttcgtgatgagattgactgtagccgagggtaaaaccga

SEQ ID NO: 54 - DNA, 105 bp, synthetic construct
  misc_feature 1..105: note = synthetic sequence
  source 1..105: mol_type = other DNA
ctcagctttaaaaggggaagtgccctagaagaaaaagagaataaaatattggtcaaagaaactggttacttttttatatatggtcaggttttatatactgataag

SEQ ID NO: 55 - DNA, 105 bp, synthetic construct
  misc_feature 1..105: note = synthetic sequence
  source 1..105: mol_type = other DNA
tattacttctgcaacctatcaatttttgatcctcctccttttaaagtaactcttacaggaggatatttgcatatttatgaatcacaactttgttgccagctgaag

SEQ ID NO: 56 - DNA, 106 bp, synthetic construct
  misc_feature 1..106: note = synthetic sequence
  source 1..106: mol_type = other DNA
ctgggcctgctgacagcgtgcaggatgctgttggaacccggcagaggctgctgtgccctggccatcctgctggcaattgtggacatccagtctggtggatgcatta

SEQ ID NO: 57 - DNA, 108 bp, synthetic construct
  misc_feature 1..108: note = synthetic sequence
  source 1..108: mol_type = other DNA
gaatcatagcaccgtgacagtggaggaggccaaggccgagaaggagacggagctgtcattgcaaaaggagcagctgcagctcaagatcattgagattgaggatgaagc

SEQ ID NO: 58 - DNA, 98 bp, synthetic construct
  misc_feature 1..98: note = synthetic sequence
  source 1..98: mol_type = other DNA
ccagcccctgatcatttcgcctaaaagagcaaggactagagttcctgacctccaggccagtccctgatccctgacctaatgttatcgcggaatgatga

SEQ ID NO: 59 - DNA, 104 bp, synthetic construct
  misc_feature 1..104: note = synthetic sequence
  source 1..104: mol_type = other DNA
gcctgctgtcgctgaaggccgacgtgctgggggatgacggctccctgctgttcgagtacctgcccagaggggcccactcgctgtccctgaatgagttcacggtg

SEQ ID NO: 60 - DNA, 108 bp, synthetic construct
  misc_feature 1..108: note = synthetic sequence
  source 1..108: mol_type = other DNA
ggcagcggcagctccactcagccagtacccagatacgctgggaaccttccccagccatggcttccctggggcagatcctcttctggagcataattagcatcatcatta

SEQ ID NO: 61 - DNA, 103 bp, synthetic construct
  misc_feature 1..103: note = synthetic sequence
  source 1..103: mol_type = other DNA
aagatacttctgcacgtcacattcaaatcccatcgtgttcctgcttcaggggaccttagggattgtcatcaaccagggacttcgggggaaatctggagcattt

SEQ ID NO: 62 - DNA, 108 bp, synthetic construct
  misc_feature 1..108: note = synthetic sequence
  source 1..108: mol_type = other DNA
caccagatagcagctttattcacagtgacagtccctaaggaactgtacataatagagcatggcagcaatgtgaccctggaatgcaactttgacactggaagtcatgtg

SEQ ID NO: 63 - DNA, 110 bp, synthetic construct
  misc_feature 1..110: note = synthetic sequence
  source 1..110: mol_type = other DNA
tggccagatctttagaccagacaactttgtatttggtcagtctggggcaggtaacaactgggccaaaggccactacacagagggcgccgagctggttgattctgtcctgg

SEQ ID NO: 64 - DNA, 107 bp, synthetic construct
  misc_feature 1..107: note = synthetic sequence
  source 1..107: mol_type = other DNA
tgaccctgcatggtgtgcggtgccctcctgcctcaggccgcgaagaaggatctaagggcttggcttgtttgaaagaaccacaccccgaaagtaacatctttggagaa

SEQ ID NO: 65 - DNA, 98 bp, synthetic construct
  misc_feature 1..98: note = synthetic sequence
  source 1..98: mol_type = other DNA
tgtgatggccttcctgctctctggtgctgctcctctgaagattcaagcttatttcaatgagactgcagacctgccatgccaatttgcaaactctcaaa

SEQ ID NO: 66 - DNA, 111 bp, synthetic construct
  misc_feature 1..111: note = synthetic sequence
  source 1..111: mol_type = other DNA
tcccaggcataatgaatgatgaaaaatttaacctgaagttggtcatcaaaccagccaaggtcacccctgcaccgactcggcagagagacttcactgcagcctttccaagga

SEQ ID NO: 67 - DNA, 106 bp, synthetic construct
  misc_feature 1..106: note = synthetic sequence
  source 1..106: mol_type = other DNA
gagaagagtcggaagaggtgtggcggcatcctagtgagaaaggactttgtgctgacagctgctcactgccagggaagctccataaatgtcaccttgggggcccaca

SEQ ID NO: 68 - DNA, 107 bp, synthetic construct
  misc_feature 1..107: note = synthetic sequence
  source 1..107: mol_type = other DNA
gcgagagcctgaagagttggaccagttgtacctggatgacgtaaatgaaataatacgaaatgacctctccagcacgagcacccactcctagttgccacattggagca

SEQ ID NO: 69 - DNA, 107 bp, synthetic construct
  misc_feature 1..107: note = synthetic sequence
  source 1..107: mol_type = other DNA
ctgcatgatcgtcgggagccccgagctgaccttcgggaagggaactcagctgagtgtggttgatttccttcccaccactgcccagcccaccaagaagtccaccctca

SEQ ID NO: 70 - DNA, 104 bp, synthetic construct
  misc_feature 1..104: note = synthetic sequence
  source 1..104: mol_type = other DNA
ggcacctgcacacctggatccaggataacggaggctgggatgcctttgtggaactgtacggccccagcatgcggcctctgtttgatttctcctggctgtctctg

SEQ ID NO: 71 - DNA, 100 bp, synthetic construct
  misc_feature 1..100: note = synthetic sequence
  source 1..100: mol_type = other DNA
ggcgaccatgcaggagtcgctgcgggtgaagcagctggccgaagagcagaagcgtcgggagagggagcagcacatcgcagagtgcatggccaagatgcca

SEQ ID NO: 72 - DNA, 111 bp, synthetic construct
  misc_feature 1..111: note = synthetic sequence
  source 1..111: mol_type = other DNA
cggcgccgaaagaactaaaattccagatggcaaactcaatgaatggcagaaaccctggtggtcgaggaggaaatccccgaaaaggtcgaattttgggtattattgatgcta

SEQ ID NO: 73 - DNA, 100 bp, synthetic construct
  misc_feature 1..100: note = synthetic sequence
  source 1..100: mol_type = other DNA
gacacagcaagaaaggaggcattcacggaagcccggggtgcccgaagaggagttaaaaaagtcatggttattgtgacagatggagagtctcatgacaatc

SEQ ID NO: 74 - DNA, 104 bp, synthetic construct
  misc_feature 1..104: note = synthetic sequence
  source 1..104: mol_type = other DNA
gtccccggcctgtggtcaaatcgggagacaagcccagcctttcggcgagatacgtctaaccctgtgcaacagccactacattacttcaaactgagatccttcct

SEQ ID NO: 75 - DNA, 98 bp, synthetic construct
  misc_feature 1..98: note = synthetic sequence
  source 1..98: mol_type = other DNA
tggggactgctcacgttcatcatggtgcctggctgccaggcagagctctgtgacgatgacccgccagagatcccacacgccacattcaaagccatggc

SEQ ID NO: 76 - DNA, 100 bp, synthetic construct
  misc_feature 1..100: note = synthetic sequence
  source 1..100: mol_type = other DNA
ccacacttccgtgattatctgcgtgcattttggacaaagcttccaaccaggatacgggaagaagaaatggctggtgatctttcagcaggtttcttcatgg

SEQ ID NO: 77 - DNA, 95 bp, synthetic construct
  misc_feature 1..95: note = synthetic sequence
  source 1..95: mol_type = other DNA
caacaggctcgtccaaacctgcgggtgaccagctgcccgcggctctgtggaccagcagtgcggtgctgggactgctgctcctggccttgcccacc

SEQ ID NO: 78 - DNA, 110 bp, synthetic construct
  misc_feature 1..110: note = synthetic sequence
  source 1..110: mol_type = other DNA
ctatcccccagccatgaagaatgcccatgccaaggcctcccgcacctcgtccaaacacaaggaggatgtgtatgagaacctgcacactaagaacaagagggaggagaaag

SEQ ID NO: 79 - DNA, 107 bp, synthetic construct
  misc_feature 1..107: note = synthetic sequence
  source 1..107: mol_type = other DNA
gcagacagcgaccaaaaagcccagggggcattcaaccccatgtttctagaactctgttcctgctgctgctgttggcagcctcagcctggggggtcaccctgagcccc

SEQ ID NO: 80 - DNA, 109 bp, synthetic construct
  misc_feature 1..109: note = synthetic sequence
  source 1..109: mol_type = other DNA
tcttcgacgatcggagcttggtgctgacctatgtgtttaccatcctcaactgcctgcagggcgccttcctctacctgctgcactgcctgctcaacaagaaggttcggga

SEQ ID NO: 81 - DNA, 102 bp, synthetic construct
  misc_feature 1..102: note = synthetic sequence
  source 1..102: mol_type = other DNA
ttgctgctcaaggaaggggtggatggcaactttcttttaagagacagcgagtcgataccaggagtcctgtgcctctgtgtctcgtttaaaaatattgtctac

SEQ ID NO: 82 - DNA, 106 bp, synthetic construct
  misc_feature 1..106: note = synthetic sequence
  source 1..106: mol_type = other DNA
tgaccgtgcaggttcttccccagtgtgagtgccggtgccgggaccagagcagagaccgcagcctctgccatggcaagggcttcttggagtgcggcatctgcaggtg

SEQ ID NO: 83 - DNA, 108 bp, synthetic construct
  misc_feature 1..108: note = synthetic sequence
  source 1..108: mol_type = other DNA
tccatatcagagctgtgatcttgagagccctctccttggctttcctgctgagtctccgaggagctggggccatcaaggcggaccatgtgtcaacttatgccgcgtttg

SEQ ID NO: 84 - DNA, 109 bp, synthetic construct
  misc_feature 1..109: note = synthetic sequence
  source 1..109: mol_type = other DNA
aggtccaaggtggaaaagcagctacaggtcatctcagtgctccagtgggtcctgtccttccttgtactgggagtggcctgcagtgccatcctcatgtacatattctgca

SEQ ID NO: 85 - DNA, 109 bp, synthetic construct
  misc_feature 1..109: note = synthetic sequence
  source 1..109: mol_type = other DNA
catgccttggtctccttgtccttcctaaaaaaccttcgcctcatcctaggagaggagcagctagaagggaattactccttctacgtcctcgacaaccagaacttgcagc

SEQ ID NO: 86 - DNA, 107 bp, synthetic construct
  misc_feature 1..107: note = synthetic sequence
  source 1..107: mol_type = other DNA
tgctcaccctggagaatgaccagagcctgtcatttgaagcccagaaggacctgaacaacaaggtgaagacactggtggaattcctcattgataactgctttgaaata

SEQ ID NO: 87 - DNA, 108 bp, synthetic construct
  misc_feature 1..108: note = synthetic sequence
  source 1..108: mol_type = other DNA
aaggagctgaaagcgcgcaataccaagaaggagggtgacctgatagctgctcaggctcggctgaaggacctggaggctctgctgaactccaaggaggccgcactgagc

SEQ ID NO: 88 - DNA, 108 bp, synthetic construct
  misc_feature 1..108: note = synthetic sequence
  source 1..108: mol_type = other DNA
ctgaacaagtgtggcctgttcatgtgcattgcggtcaacctgtgtggaaaagccgggcccggggccaagggcaaggacatggaggagggcaaggccgccttctcgaaa

SEQ ID NO: 89 - DNA, 108 bp, synthetic construct
  misc_feature 1..108: note = synthetic sequence
  source 1..108: mol_type = other DNA
caggggagtacttctgcatctatcacacctaccctgatgggacgtacactgggagaatcttcctggaggtcctagaaagctcagtggctgagcacggtgccaggttcc

SEQ ID NO: 90 - DNA, 104 bp, synthetic construct
  misc_feature 1..104: note = synthetic sequence
  source 1..104: mol_type = other DNA
aagagcttcctgcacaaagtaagccaccagcgcaacatgacagtgaagaccctgcatggcccagccatggtcaagtacttgctgctgtcgatattggggcttgc

SEQ ID NO: 91 - DNA, 108 bp, synthetic construct
  misc_feature 1..108: note = synthetic sequence
  source 1..108: mol_type = other DNA
ctgcagctgtgctcacacctggaggaaacctcaatggtcacatcctctttcctgtgtcaagaagcatcgtccggggaggtgagaagaagacagtcctccctagaattg

SEQ ID NO: 92 - DNA, 100 bp, synthetic construct
  misc_feature 1..100: note = synthetic sequence
  source 1..100: mol_type = other DNA
ggaaggcgcttttcaccgcggccatcctgcaggcacagttgccgattacagaggcacagagctttggcctgctggatcccaaactctgctacctgctgga

SEQ ID NO: 93 - DNA, 106 bp, synthetic construct
  misc_feature 1..106: note = synthetic sequence
  source 1..106: mol_type = other DNA
ccagggctgcggcacagagctgcgagtcatgggattcagcaccttggcacagctgaagcagaggaacacgctgaaggatggtatcatcatgatccagacgctgctg

SEQ ID NO: 94 - DNA, 104 bp, synthetic construct
  misc_feature 1..104: note = synthetic sequence
  source 1..104: mol_type = other DNA
caagctcatgtggacaagatgcccctgctgagctgccagttcctgaagggtcaccgggagcagcgcctggcccacctggtcctgagcttcctcaccatgggtta

SEQ ID NO: 95 - DNA, 97 bp, synthetic construct
  misc_feature 1..97: note = synthetic sequence
  source 1..97: mol_type = other DNA
ttcctgaaacggctcgacaggaacctctggggcctggcgggcttgaattcctgtcctgtgaaggaagccaaccagagtacgttggaaaacttcttgg

SEQ ID NO: 96 - DNA, 105 bp, synthetic construct
  misc_feature 1..105: note = synthetic sequence
  source 1..105: mol_type = other DNA
tcaggagctccagggtcagaggtcggatgtctacagcgacctcaacacacagaggccgtattacaaatgagcccgaatcatgacagtcagcaacatgatacctgg

SEQ ID NO: 97 - DNA, 107 bp, synthetic construct
  misc_feature 1..107: note = synthetic sequence
  source 1..107: mol_type = other DNA
ggaactgggaaattattttgggtcttcttcttaatcccatatctggacatctggaacatccatgggaaagaatcatgtgatgtacagctttatataaagagacaatc

SEQ ID NO: 98 - DNA, 109 bp, synthetic construct
  misc_feature 1..109: note = synthetic sequence
  source 1..109: mol_type = other DNA
gtgaaggagggttggctgcacaaacgaggggagtacatcaagacctggcggccacgctacttcctcctcaagaatgatggcaccttcattggctacaaggagcggccgc

SEQ ID NO: 99 - DNA, 104 bp, synthetic construct
  misc_feature 1..104: note = synthetic sequence
  source 1..104: mol_type = other DNA
atctctgttggctccatgggattgattatcagccttctctgtgtgtatttctggctggaacggacgatgccccgaattcccaccctgaagaacctagaggatct

SEQ ID NO: 100 - DNA, 101 bp, synthetic construct
  misc_feature 1..101: note = synthetic sequence
  source 1..101: mol_type = other DNA
tcttcctgcgctgcatcgagtccaacatgctgacagatatgaccctgcagggcatcgagcagatcagcaaggtgtacatgcacttgccacagacagacaac

SEQ ID NO: 101 - DNA, 103 bp, synthetic construct
  misc_feature 1..103: note = synthetic sequence
  source 1..103: mol_type = other DNA
gttctaagaacctgcttgggagccgtgacctccaaagctctgtgaccttggacctggccctcgaccctggccgcctgagtccccgtgccaccttccaggaaac

SEQ ID NO: 102 - DNA, 107 bp, synthetic construct
  misc_feature 1..107: note = synthetic sequence
  source 1..107: mol_type = other DNA
tgataagcccactctacagctggagagtgtagatcccaaaaattacccaaagaagaagatggaaaagcgatttgtcttcaacaagatagaaatcaataacaagctgg

SEQ ID NO: 103 - DNA, 104 bp, synthetic construct
  misc_feature 1..104: note = synthetic sequence
  source 1..104: mol_type = other DNA
ggcagagaaacacataaagagctcagtgaacatccagatggcccctccatccctcaacgtgaccaaggatggagacagctacagcctgcgctgggaaacaatga

SEQ ID NO: 104 - DNA, 103 bp, synthetic construct
  misc_feature 1..103: note = synthetic sequence
  source 1..103: mol_type = other DNA
ctgaatgtttaattaatcaggaatgtgaagaaattctacagatttgctctactaaggggatgatggcaggtgcagagaaattggtggaatgccttctcagatc

SEQ ID NO: 105 - DNA, 107 bp, synthetic construct
  misc_feature 1..107: note = synthetic sequence
  source 1..107: mol_type = other DNA
aaggaattggagaattctttaggttgtcccctaaagattctgaaaaagagaatcagattcctgaagaggcaggaagcagtggcttaggaaaagcaaagagaaaagca

SEQ ID NO: 106 - DNA, 108 bp, synthetic construct
  misc_feature 1..108: note = synthetic sequence
  source 1..108: mol_type = other DNA
tggtggtgccgactacaagcgaattactgtgaaagtcaatgccccatacaacaaaatcaaccaaagaattttggttgtggatccagtcacctctgaacatgaactgac

SEQ ID NO: 107 - DNA, 108 bp, synthetic construct
  misc_feature 1..108: note = synthetic sequence
  source 1..108: mol_type = other DNA
agtgcgtgagtgaacagagcctccagttgtcagcccacctgcaggtgaaaacaaccgatgtccaacttcaagcctttgattttgaagatgaccactttggaaatgtgg

SEQ ID NO: 108 - DNA, 107 bp, synthetic construct
  misc_feature 1..107: note = synthetic sequence
  source 1..107: mol_type = other DNA
ttatgcactccgaagcagaagaatccaaggaagtggccacagatgtctttaattccaaaaacctggccgttcaggcacaaaagaagatcttgggtaaaatggtgtcc

SEQ ID NO: 109 - DNA, 110 bp, synthetic construct
  misc_feature 1..110: note = synthetic sequence
  source 1..110: mol_type = other DNA
gaagggcagggcacaatgtctcctccagagagagatggtacagtctctggagcagcagctggtgctggagaaggagaagctgagtgccatgcaggcccacctggctggga

SEQ ID NO: 110 - DNA, 103 bp, synthetic construct
  misc_feature 1..103: note = synthetic sequence
  source 1..103: mol_type = other DNA
gaccatgaatgcaaagcttctgatggatcctaagaggcagatctttctagatcaaaacatgctggcagttattgatgagctgatgcaggccctgaatttcaac

SEQ ID NO: 111 - DNA, 106 bp, synthetic construct
  misc_feature 1..106: note = synthetic sequence
  source 1..106: mol_type = other DNA
atattttgttcagtggtgtgcagacagaaatttcaccaagccgcaggatggcgatgttatagccccactcataacacctcaaaaaaaggaatggaacgacagtact

SEQ ID NO: 112 - DNA, 106 bp, synthetic construct
  misc_feature 1..106: note = synthetic sequence
  source 1..106: mol_type = other DNA
tctgcagccatgagcagaggcgacaactgcacggatctactcgcactgggaatcccctccataacccaggcctggggactgtgggtcctcttaggggctgtgacgc

SEQ ID NO: 113 - DNA, 103 bp, synthetic construct
  misc_feature 1..103: note = synthetic sequence
  source 1..103: mol_type = other DNA
ctgggggcttgctgctgctggtttactactggagcaagaatagaaaggccaaggccaagcctgtgacacgaggagcgggtgctggcggcaggcaaaggggaca

SEQ ID NO: 114 - DNA, 105 bp, synthetic construct
  misc_feature 1..105: note = synthetic sequence
  source 1..105: mol_type = other DNA
gccaatccctgggattccaggaggttttgagcgttgaggttacactgcatgtggcagcaaacttcagcgtgcccgtcgtcagcgccccccacagcccctcccagg

SEQ ID NO: 115 - DNA, 103 bp, synthetic construct
  misc_feature 1..103: note = synthetic sequence
  source 1..103: mol_type = other DNA
gaacatggaagacttacatcgtcatatcttctgggaaccagatgcaagtaagctgaatgagaattactgccgaaatccagatgatgatgctcatggaccctgg

SEQ ID NO: 116 - DNA, 101 bp, synthetic construct
  misc_feature 1..101: note = synthetic sequence
  source 1..101: mol_type = other DNA
aaaaatcatggataaaaacacactagggagtgatttgccccggatcaaaacggagattgaggccttgaagaacctgagacatcagcatatatgtcaactct

SEQ ID NO: 117 - DNA, 1371 bp, synthetic construct
  misc_feature 1..1371: note = synthetic sequence
  source 1..1371: mol_type = other DNA
ttgagttccacatgcagagcagatgcgacagctagaagtgagtagggcccagaccctggcccaggaagatccactaaaggaggccatccttccgccttcttctgcaggagtcaggatggaaaggcagatgtaaagtccctcatggcgaaatataacacggggggcaacccgacagaggatgtctcagtcaatagccgacccttcagagtcacagggccaaactcatcttcaggaatacaagcaagaaagaacttattcaacaaccaaggaaatgccagccctcctgcaggacccagcaatgtacctaagtttgggtccccaaagccacctgtggcagtcaaaccttcttctgaggaaaagcctgacaaggaacccaagcccccgtttctaaagcccactggagcaggccaaagattcggaacaccagccagcttgaccaccagagaccccgaggcgaaagtgggatttctgaaacctgtaggccccaagcccatcaacttgcccaaagaagattccaaacctacatttccctggcctcctggaaacaagccatctcttcacagtgtaaaccaagaccatgacttaaagccactaggcccgaaatctgggcctactcctccaacctcagaaaatgaacagaagcaagcgtttcccaaattgactggggttaaagggaaatttatgtcagcatcacaagatcttgaacccaagcccctcttccccaaacccgcctttggccagaagccgcccctaagtaccgagaactcccatgaagacgaaagccccatgaagaatgtgtcttcatcaaaagggtccccagctcccctgggagtcaggtccaaaagcggccctttaaaaccagcaagggaagactcagaaaataaagaccatgcaggggagatttcaagtttgccctttcctggagtggttttgaaacctgctgcgagcaggggaggcccaggtctctccaaaaatggtgaagaaaaaaaggaagataggaagatagatgctgctaagaacaccttccagagcaaaataaatcaggaagagttggcctcagggactcctcctgccaggttccctaaggccccttctaagctgacagtgggggggccatggggccaaagtcaggaaaaggaaaagggagacaagaattcagccaccccgaaacagaagccattgcctcccttgtttaccttgggtccacctccaccaaaacccaacagaccaccaaatgttgacctgacgaaattccacaaaacctcttctggaaacagtactagcaaaggccagacgtcttactcaacaacttccctgccaccacctccaccatcccatccggccagccaaccaccattgccagcatctcac

SEQ ID NO: 118 - DNA, 106 bp, synthetic construct
  misc_feature 1..106: note = synthetic sequence
  source 1..106: mol_type = other DNA
tcctgcccgtgcctggcccaggagggcccccagggtgacctgttgaccaaaacacaggagctgggccgtgactacaggacctgtctgacgatagtccaaaaactga

SEQ ID NO: 119 - DNA, 107 bp, synthetic construct
  misc_feature 1..107: note = synthetic sequence
  source 1..107: mol_type = other DNA
gccttttcaccatgagtgggtgcccatttttaggaaacaactttggatatacttttaaaaaactccccgtagaaggcagcgaagaagacaaatcacaaactggtgtg

SEQ ID NO: 120 - DNA, 458 bp, synthetic construct
  misc_feature 1..458: note = synthetic sequence
  source 1..458: mol_type = other DNA
tcatcgacaaggtgcggttcctggagcagcagaacaaggttctggacaccaagtggaccctgctgcaggagcagggcaccaagactgtgaggcagaacctggagccgttgttcgagcagtacatcaacaacctcaggaggcagctggacagcatcgtgggggaacggggccgcctggactcagagctgagaaacatgcaggacctggtggaagacttcaagaacaagtatgaggatgaaatcaacaagcgtaccactgctgagaatgagtttgtgatgctgaagaaggatgtagatgctgcctacatgaacaaggtggagctggaggccaaggttgatgcactgatggatgagattaacttcatgaagatgttctttgatgcggagctgtcccagatgcagacgcatgtctctgacacctcagtggtcctctccatggacaacaaccgcaacctggac

SEQ ID NO: 121 - DNA, 108 bp, synthetic construct
  misc_feature 1..108: note = synthetic sequence
  source 1..108: mol_type = other DNA
tctgaggcggagcaccagagagcctacctggaagacacatgcgtggagtggctccacaaatacctggagaaggggaaggagacgctgcttcacctggagcccccaaag

SEQ ID NO: 122 - DNA, 105 bp, synthetic construct
  misc_feature 1..105: note = synthetic sequence
  source 1..105: mol_type = other DNA
ctgctggagaatgtgctgtgtggcgtggcctttggcctgggtgtgctgggcatcatcgtgggcattgttctcatcatctacttccggaagccttgctcaggtgac

SEQ ID NO: 123 - DNA, 111 bp, synthetic construct
  misc_feature 1..111: note = synthetic sequence
  source 1..111: mol_type = other DNA
atggtgaaaaatggcaacgggaccgcgtgcataatggccaacttctctgctgccttctcagtgaactacgacaccaagagtggccctaagaacatgacctttgacctgcca

SEQ ID NO: 124 - DNA, 95 bp, synthetic construct
  misc_feature 1..95: note = synthetic sequence
  source 1..95: mol_type = other DNA
ccctggccgtgccctgagtgaccgtcgggcttgcagggcctgcgactgtcacccggttggtgctgctggcaagacctgcaaccagaccacaggcc

SEQ ID NO: 125 - DNA, 103 bp, synthetic construct
  misc_feature 1..103: note = synthetic sequence
  source 1..103: mol_type = other DNA
agagcaatggaaccattatccatgtgaaagggaaacacctttgtccaagtcccctatttcccggaccttctaagcccttttgggtgctggtggtggttggtgg

SEQ ID NO: 126 - DNA, 101 bp, synthetic construct
  misc_feature 1..101: note = synthetic sequence
  source 1..101: mol_type = other DNA
caattgttcaaaagatgcaaatgatacactactgctgcagctcacaaacacctctgcatattacatgtacctcctcctgctcctcaagagtgtggtctatt

SEQ ID NO: 127 - DNA, 103 bp, synthetic construct
  misc_feature 1..103: note = synthetic sequence
  source 1..103: mol_type = other DNA
ggcccgagacccccagcgctaccttgtcattcagggggatgaaagaatgcatttgccaagtcctacagactccaacttctaccgtgccctgatggatgaagaa

SEQ ID NO: 128 - DNA, 106 bp, synthetic construct
  misc_feature 1..106: note = synthetic sequence
  source 1..106: mol_type = other DNA
gcctcacagaccttcctcagagccgctttcagaaaagcaagctgcttctggttgggcccagacctgccttgaggagcctgtagagttaaaaaatgaaccccacgga

SEQ ID NO: 129 - DNA, 104 bp, synthetic construct
  misc_feature 1..104: note = synthetic sequence
  source 1..104: mol_type = other DNA
cggcctgacgtcggtggagggaagcaggcgcaggctccgtgaggaggcaaggttctgaggagacaggccccggagcagcactagctcctgcccacactcctacc

SEQ ID NO: 130 - DNA, 108 bp, synthetic construct
  misc_feature 1..108: note = synthetic sequence
  source 1..108: mol_type = other DNA
cagccatgcctcacagctccgacagcagtgactccagcttcagccgctctcctccccctggcaaacaggactcatctgatgatgtgagaagagttcagaggagggaga

SEQ ID NO: 131 - DNA, 108 bp, synthetic construct
  misc_feature 1..108: note = synthetic sequence
  source 1..108: mol_type = other DNA
ggtctgaggaacaattctggctggaggtgggaagatggatcacctctaaacttctcaaggatttcttctaatagctttgtgcagacatgcggtgccatcaacaaaaat

SEQ ID NO: 132 - DNA, 100 bp, synthetic construct
  misc_feature 1..100: note = synthetic sequence
  source 1..100: mol_type = other DNA
taagcgcctatgccagcatcagtttccagaagcagccagaggaccgtcagtagctcaactggacatcacagcagaatgaagacctaaatgacctcagcaa

SEQ ID NO: 133 - DNA, 106 bp, synthetic construct
  misc_feature 1..106: note = synthetic sequence
  source 1..106: mol_type = other DNA
agggcaacagttatactttcatcgaccccacgcagctgccttacaacgagaagtgggagttcccccggaacaacctgcagtttggtaagaccctcggagctggagc

SEQ ID NO: 134 - DNA, 105 bp, synthetic construct
  misc_feature 1..105: note = synthetic sequence
  source 1..105: mol_type = other DNA
ggcaacggaacccagatttatgtaattgatccagaaccgtgcccagattctgacttcctcctctggatccttgcagcagttagttcggggttgtttttttatagc

SEQ ID NO: 135 - DNA, 100 bp, synthetic construct
  misc_feature 1..100: note = synthetic sequence
  source 1..100: mol_type = other DNA
gatcatcctggaagctgtggctcttttgctcaatagttatgttgctatttctttgctccttcagttggctaatctttatttttctccaattagagactgc

SEQ ID NO: 136 - DNA, 107 bp, synthetic construct
  misc_feature 1..107: note = synthetic sequence
  source 1..107: mol_type = other DNA
aaaaggcaacatcctgtcacaggccatgctctggcaaaaacccacagctccggagcaagccccagccccggcccggccataccagggcgtccgtgtgaaggagccag

SEQ ID NO: 137 - DNA, 100 bp, synthetic construct
  misc_feature 1..100: note = synthetic sequence
  source 1..100: mol_type = other DNA
ggtcctacttagtcttgacagaaaaaccatctgtgctggggctttgattgcaaaagactgggtgttgactgcagctcactgtaacttgaacaaaaggtcc

SEQ ID NO: 138 - DNA, 106 bp, synthetic construct
  misc_feature 1..106: note = synthetic sequence
  source 1..106: mol_type = other DNA
aagagtaccttgttccaatcccaggtggaatgaatggctgaattatgatatatacattcctgatcttcctcgtgctgctcgactttgcctttccatttgctctgtt

SEQ ID NO: 139 - DNA, 106 bp, synthetic construct
  misc_feature 1..106: note = synthetic sequence
  source 1..106: mol_type = other DNA
ctgaagacaacaggcgaccactttgggaacctgaagaaactgtggtcattgccttatatgactaccaaaccaatgatcctcaggaactcgcactgcggcgcaacga

SEQ ID NO: 140 - DNA, 106 bp, synthetic construct
  misc_feature 1..106: note = synthetic sequence
  source 1..106: mol_type = other DNA
cacattctcaggaactctccttctttgggtctggctgaagttgaggatctcttactctctaggccacggaattaacccgagcaggcatggaggcctctgctctcac

SEQ ID NO: 141 - DNA, 105 bp, synthetic construct
  misc_feature 1..105: note = synthetic sequence
  source 1..105: mol_type = other DNA
aatgtgttcgtagaggtggtgctggcggaccccaaccactggcgcttccaggggggcaaatgggtgacctgtggcaaagccgacaataacatgcagggcaacaaa

SEQ ID NO: 142 - DNA, 106 bp, synthetic construct
  misc_feature 1..106: note = synthetic sequence
  source 1..106: mol_type = other DNA
gatcccagccccacctctgagcaaggtccctctgcagcagaacttccaggacaaccaattccaggggaagtggtatgtggtaggcctggcagggaatgcaattctc

SEQ ID NO: 143 - DNA, 100 bp, synthetic construct
  misc_feature 1..100: note = synthetic sequence
  source 1..100: mol_type = other DNA
gctcttggtgctggctggtctttctcacttctgttcaggtgttatccacgtgaccaaggaagtgaaagaagtggcaacgctgtcctgtggtcacaatgtt

SEQ ID NO: 144 - DNA, 100 bp, synthetic construct
  misc_feature 1..100: note = synthetic sequence
  source 1..100: mol_type = other DNA
ctcggggacatacaggtgcactctgcaggacccggatgggcagagaaacctaagtggcaaggtgatcttgagagtgacaggatgccctgcacagcgtaaa

SEQ ID NO: 145 - DNA, 105 bp, synthetic construct
  misc_feature 1..105: note = synthetic sequence
  source 1..105: mol_type = other DNA
ttatccctagacgcttcattgatcgaattcaaatcttgccccgtgggaatggttgtccaagaaaagaaatcatagtctggaagaagaacaagtcaattgtgtgtg

SEQ ID NO: 146 - DNA, 102 bp, synthetic construct
  misc_feature 1..102: note = synthetic sequence
  source 1..102: mol_type = other DNA
ttggggaaaggaacgtgaaaggcatgtttgaggtgctggagcccttgcatgctatgatggaacggggcccccagactctgaaggaaacatcctttaatcagg

SEQ ID NO: 147 - DNA, 107 bp, synthetic construct
  misc_feature 1..107: note = synthetic sequence
  source 1..107: mol_type = other DNA
ccagcagtggtcttgctcttactccttttggttgaacaagcagcggccctgggagagcctcagctctgctatatcctggatgccatcctgtttctgtatggaattgt

SEQ ID NO: 148 - DNA, 107 bp, synthetic construct
  misc_feature 1..107: note = synthetic sequence
  source 1..107: mol_type = other DNA
caatcacactcagtttccaccatctcggtcatcaggattgcctaatatacctgtccagacaatctccagagctgctgcagaaaagctgtttgggaatatggaaggag

SEQ ID NO: 149 - DNA, 106 bp, synthetic construct
  misc_feature 1..106: note = synthetic sequence
  source 1..106: mol_type = other DNA
tgtgccgggcctacaatgctgacaaccgcacggtcttttttgaaggcaaatacggtggcatggagctgttccgagccttgggctgcagcgagctcatcagctccat

SEQ ID NO: 150 - DNA, 109 bp, synthetic construct
  misc_feature 1..109: note = synthetic sequence
  source 1..109: mol_type = other DNA
ggcttctgcccggaccaaggatacagtttgttcctcgtggcggcgcatgagttcggccacgcgctgggcttagatcattcctcagtgccggaggcgctcatgtacccta

SEQ ID NO: 151 - DNA, 103 bp, synthetic construct
  misc_feature 1..103: note = synthetic sequence
  source 1..103: mol_type = other DNA
caacaagagctgaccgaggcccagaagggctttcaggatgtggaggcccaggccgccacctgcaaccacactgtgatggccctaatggcttccctggatgcag

SEQ ID NO: 152 - DNA, 111 bp, synthetic construct
  misc_feature 1..111: note = synthetic sequence
  source 1..111: mol_type = other DNA
ggctccttcgccatcaagtcgctgcggaaactgacggacgatgagctgttccagtacctgctgcagctggtgcaggtgctcaagtacgagtcctacctggactgcgagctg

SEQ ID NO: 153 - DNA, 111 bp, synthetic construct
  misc_feature 1..111: note = synthetic sequence
  source 1..111: mol_type = other DNA
ggggatcattgtggctgtggtcactgggattgctgtagcggccattgttgctgctgtagtggccttgatctactgcaggaaaaagcggatttcagctctcccaggataccc

SEQ ID NO: 154 - DNA, 104 bp, synthetic construct
  misc_feature 1..104: note = synthetic sequence
  source 1..104: mol_type = other DNA
ccaagtgcagctggctggtgacgaaggccggagctgggaccagcagctcccactgggtatggtggtttctctcagggagcctcgtcatcgtcattgtttgctcc

SEQ ID NO: 155 - DNA, 109 bp, synthetic construct
  misc_feature 1..109: note = synthetic sequence
  source 1..109: mol_type = other DNA
ttcgcccagccaagttgaagaacctaatcttgctggtgaagcactggtaccaccaggtgtgcctacaggggttgtggaaggagacgctgcccccggtctatgccctgga

SEQ ID NO: 156 - DNA, 104 bp, synthetic construct
  misc_feature 1..104: note = synthetic sequence
  source 1..104: mol_type = other DNA
tgatttcactgcttcaggtgaggatgaactgagctttcacactggagatgttttgaagattttaagtaaccaagaggagtggtttaaggcggagcttgggagcc

SEQ ID NO: 157 - DNA, 109 bp, synthetic construct
  misc_feature 1..109: note = synthetic sequence
  source 1..109: mol_type = other DNA
acttcttaaggcgagcatcaaaagccggggaggttgatgttgaacagcacactttagccaagtatttgatggagctgactctcatcgactatgatatggtgcattatca

SEQ ID NO: 158 - DNA, 106 bp, synthetic construct
  misc_feature 1..106: note = synthetic sequence
  source 1..106: mol_type = other DNA
tcctgggagtcttactgctcatcggctgttggtattgtagaagacgaaatggatacagagccttgatggataaaagtcttcatgttggcactcaatgtgccttaac

SEQ ID NO: 159 - DNA, 104 bp, synthetic construct; identical to SEQ ID NO: 129
  misc_feature 1..104: note = synthetic sequence
  source 1..104: mol_type = other DNA

SEQ ID NO: 160 - DNA, 104 bp, synthetic construct
  misc_feature 1..104: note = synthetic sequence
  source 1..104: mol_type = other DNA
aatggattctgtgcccacagtaaggcaggctgtaaaagaattgcaagtctacatatcacccaagaatacagttatttctgtgaatccatccacaaagctgcaag

SEQ ID NO: 161 - DNA, 100 bp, synthetic construct
  misc_feature 1..100: note = synthetic sequence
  source 1..100: mol_type = other DNA
aatcgcagatggagggactcctgacatagccagctgctgtgaaataatggaagagcttacaacctgccttaaaaattaccgaaaaaccttaatacactgc

SEQ ID NO: 162 - DNA, 107 bp, synthetic construct
  misc_feature 1..107: note = synthetic sequence
  source 1..107: mol_type = other DNA
gacgggactccagaaagaccatgccctctgggatcacactgcccagaatctccttcggatgggcctggcctttctagtcctggtggctctagtgtggttcctggttg

SEQ ID NO: 163 - DNA, 102 bp, synthetic construct
  misc_feature 1..102: note = synthetic sequence
  source 1..102: mol_type = other DNA
cagttgagactcagaacttggaaggcctgcatcatgatggccaattctgccataagccctgtcctccaggtgaaaggaaagctagggactgcacagtcaatg

SEQ ID NO: 164 - DNA, 107 bp, synthetic construct
  misc_feature 1..107: note = synthetic sequence
  source 1..107: mol_type = other DNA
gtgcgaatctgacttacgccattattacgacagtaccattgagttgtgcgtgggggacccagagattaaaaagacttcctttaagggggactctggaggccctcttg

SEQ ID NO: 165 - DNA, 103 bp, synthetic construct
  misc_feature 1..103: note = synthetic sequence
  source 1..103: mol_type = other DNA
cttatcacagtgaagatggagcaggcctttgcccgatacttgctggagcagactccagagcagcaggcagccattctgtccctggtgtagagcctgggggacc

SEQ ID NO: 166 - DNA, 106 bp, synthetic construct
  misc_feature 1..106: note = synthetic sequence
  source 1..106: mol_type = other DNA
cgcctactccgtgaagtctagggacaggaagatggttggcgacgtgaccggggcccaggcctatgcctccaccgccaagtgcctgaacatctgggccctgattctg

SEQ ID NO: 167 - DNA, 110 bp, synthetic construct
  misc_feature 1..110: note = synthetic sequence
  source 1..110: mol_type = other DNA
gaagggaaagctgggggctccccactgcacttgccacctgagtcacattttcagaagcctctggaaagtcgtgcacagcccaggagtgttgagcaatttcggtttcctct

SEQ ID NO: 168 - DNA, 107 bp, synthetic construct
  misc_feature 1..107: note = synthetic sequence
  source 1..107: mol_type = other DNA
ctggagaacgggaaggacaagctggagcgcgctgaccccccaaagacacacgtgacccaccaccccatctctgaccatgaggccaccctgaggtgctgggccctggg

SEQ ID NO: 169 - DNA, 99 bp, synthetic construct
  misc_feature 1..99: note = synthetic sequence
  source 1..99: mol_type = other DNA
acatcggaactgcgactcagcatgcagaagtcaatgcaaaatcatgctgccgtgttccgtgtgggaagcgtgttgcaagaaggttgtgggaaaatcagc

SEQ ID NO: 170 - DNA, 105 bp, synthetic construct
  misc_feature 1..105: note = synthetic sequence
  source 1..105: mol_type = other DNA
tcctaccgagagtggatacaggtagacttgggccttctgcgctttgtcacggctgtcgggacacagggcgccatttcaaaagaaaccaagaagaaatattatgtc

SEQ ID NO: 171 - DNA, 109 bp, synthetic construct
  misc_feature 1..109: note = synthetic sequence
  source 1..109: mol_type = other DNA
gctgcgcgcttccaccgggtggggcccattgaagccacgtccttcatcctcagggctgtgcggccccgagccaggtactacgtccaagtggcggctcaggacctcacag

SEQ ID NO: 172 - DNA, 101 bp, synthetic construct
  misc_feature 1..101: note = synthetic sequence
  source 1..101: mol_type = other DNA
ggagaggaagtctgagtcagcccatcctgttgggagccctggagagagtggcacatcagggtggcgagggggggacactcccagccccctctgtctcttgc

SEQ ID NO: 173 - DNA, 107 bp, synthetic construct
  misc_feature 1..107: note = synthetic sequence
  source 1..107: mol_type = other DNA
cctgcaaggtggagcacgagagctttgagaagcctcagctgctgactgtgaacctcaccgtgtactaccccccagaggtatccatctctggctatgataacaactgg

SEQ ID NO: 174 - DNA, 102 bp, synthetic construct
  misc_feature 1..102: note = synthetic sequence
  source 1..102: mol_type = other DNA
tatcttcagcttgtgataaagagtcaaatatggaacgaagagtgatcacgatttctaaatcagaatattctgtgcactcatctttggcatccaaagttgatg

SEQ ID NO: 175 - DNA, 103 bp, synthetic construct
  misc_feature 1..103: note = synthetic sequence
  source 1..103: mol_type = other DNA
atgaataacactctaagaaaggatggaaagaaagattgctgttttgaaatctctgctcctgataaacgtatatatcagtttacagcagcttctcccaaagatg

SEQ ID NO: 176 - DNA, 106 bp, synthetic construct
  misc_feature 1..106: note = synthetic sequence
  source 1..106: mol_type = other DNA
agtttccatgtggtacacactcccccgctgcaccctgacttcaagagggccctcggggacctgccccaccacttcaacgcctccacccagcccgcctacctcaggc

SEQ ID NO: 177 - DNA, 106 bp, synthetic construct
  misc_feature 1..106: note = synthetic sequence
  source 1..106: mol_type = other DNA
tccaaaacagacttgggtgaaatatattgtgcgtctcctcagtaaaaaagtcaagaacatgtaaaaactgtggcttttctggaatggaattggacatagcccaaga

SEQ ID NO: 178 - DNA, 108 bp, synthetic construct
  misc_feature 1..108: note = synthetic sequence
  source 1..108: mol_type = other DNA
gactgcatgtgtgtccagcctgaattccactgcggagacccttgctgcacgacctgccggcaccacccttgtcccccaggccagggggtacagtcccaggggaaattc

SEQ ID NO: 179 - DNA, 104 bp, synthetic construct
  misc_feature 1..104: note = synthetic sequence
  source 1..104: mol_type = other DNA
gaaaacctatggcaaacaatacaaggaaaagaatgaagaagcagtacgacgtctcatctgggaaaagaatctaaagtttgtgatgcttcacaacctggagcatt

SEQ ID NO: 180 - DNA, 107 bp, synthetic construct
  misc_feature 1..107: note = synthetic sequence
  source 1..107: mol_type = other DNA
ctcctggtccttctacctgggctgggtctcagctatcctcttgctctgtacaggtgccctgagcctgggtgctcactgtggcggtccccgtcctggctatgaaacct

SEQ ID NO: 181 - DNA, 107 bp, synthetic construct
  misc_feature 1..107: note = synthetic sequence
  source 1..107: mol_type = other DNA
caggagcttgtgccgtggcccacagcccacagcccacagccatgggctgggacctgacggtgaagatgctggcgggcaacgaattccaggtgtccctgagcagctcc

SEQ ID NO: 182 - DNA, 101 bp, synthetic construct
  misc_feature 1..101: note = synthetic sequence
  source 1..101: mol_type = other DNA
gactccccagacaggccctggaacccccccaccttctccccagccctgctcgtggtgaccgaaggggacaacgccaccttcacctgcagcttctccaacac

SEQ ID NO: 183 - DNA, 108 bp, synthetic construct
  misc_feature 1..108: note = synthetic sequence
  source 1..108: mol_type = other DNA
tacagcgagctgcaggactctaatccagagtttaccttccagcagccctacgaccaggcccacctgctggcagccatcccacctccggagatcctcaaccccaccgcc

SEQ ID NO: 184 - DNA, 100 bp, synthetic construct
  misc_feature 1..100: note = synthetic sequence
  source 1..100: mol_type = other DNA
gttgttcaaggcttccccatgttcaaaagaggacgctgtctttgcataggccctggggtaaaagcagtgaaagtggcagatattgagaaagcctccataa

SEQ ID NO: 185 - DNA, 103 bp, synthetic construct
  misc_feature 1..103: note = synthetic sequence
  source 1..103: mol_type = other DNA
ggacctggctggagaagaagagattgagctctactcagaacccgacacagacaccatcaactgcgaccagttcagcaggctgttgtgtgacatggaaggtgat

SEQ ID NO: 186 - DNA, 107 bp, synthetic construct
  misc_feature 1..107: note = synthetic sequence
  source 1..107: mol_type = other DNA
tagtttccaatttgcggatccactgccctctgcttgcgggctctgctctgatcacctttgatgaccccaaagtggctgagcaggtgctgcaacaaaaggagcacacg

SEQ ID NO: 187 - DNA, 87 bp, synthetic construct
  misc_feature 1..87: note = synthetic sequence
  source 1..87: mol_type = other DNA
ggcccaaaatgttctgctgatcgatgggcccctgagctggtacagtgacccaggcctggcaggcgtgtccctgacggggggcctgag

SEQ ID NO: 188 - DNA, 106 bp, synthetic construct
  misc_feature 1..106: note = synthetic sequence
  source 1..106: mol_type = other DNA
gcagatgcaggacaagtactccaaaagtggcattgcttgtttcttaaaagaagatgacagttattgggaccccaatgacgaagagagtatgaacagcccctgctgg

SEQ ID NO: 189 - DNA, 108 bp, synthetic construct
  misc_feature 1..108: note = synthetic sequence
  source 1..108: mol_type = other DNA
tgagaaggatggcaagtacggcttctgtccccatgaagccctgttcaccatgggcggcaacgctgaaggacagccctgcaagtttccattccgcttccagggcacatc

SEQ ID NO: 190 - DNA, 105 bp, synthetic construct
  misc_feature 1..105: note = synthetic sequence
  source 1..105: mol_type = other DNA
ccaactgcctgacaatctgtaccccgaggagatccccagcgcgctcaacctcttctccggcagcagcgactcggtagtccattacaatcagatggctacagagaa

SEQ ID NO: 191 - DNA, 111 bp, synthetic construct
  misc_feature 1..111: note = synthetic sequence
  source 1..111: mol_type = other DNA
ctgagggacggcgtagagttcggccgaaggaacctgacccaggctctgtgaggaggcaaggttttcaggggacaggccaacccagaggacaggattccctggaggccacag

SEQ ID NO: 192 - DNA, 103 bp, synthetic construct
  misc_feature 1..103: note = synthetic sequence
  source 1..103: mol_type = other DNA
gtccttcagagcaagtggcctctgtaatctgctcaggaaaccagtcccaaacactgtcctcgtgcaattcatcgtctttgggcccaacaaggcctaccattcc

SEQ ID NO: 193 - DNA, 105 bp, synthetic construct
  misc_feature 1..105: note = synthetic sequence
  source 1..105: mol_type = other DNA
agtgaggaacaagccagagctgtgcagatgagtacaaaagtcctgatccagttcctgcagaaaaaggcaaagaatctagatgcaataaccacccctgacccaacc

SEQ ID NO: 194 - DNA, 97 bp, synthetic construct
  misc_feature 1..97: note = synthetic sequence
  source 1..97: mol_type = other DNA
gaatatctggaaccgtgaatggtattctcactttgactttgatctccttgatcctgttggtttctcagggagtattgctaaaatgccaaaaaggaag

SEQ ID NO: 195 - DNA, 110 bp, synthetic construct
  misc_feature 1..110: note = synthetic sequence
  source 1..110: mol_type = other DNA
ccagttgggccggactctccaaacctgcttccgcaatgggtgggttgtgagtgctggtaatgaggagccgtgggtgcagccagccttggagatgccgaagagacgggaca

SEQ ID NO: 196 - DNA, 104 bp, synthetic construct
  misc_feature 1..104: note = synthetic sequence
  source 1..104: mol_type = other DNA
acaggaggcagaggcatcatggagggtccccggggatggctggtgctctgtgtgctggccatatcgctggcctctatggtgaccgaggacttgtgccgagcacc

SEQ ID NO: 197 - DNA, 108 bp, synthetic construct
  misc_feature 1..108: note = synthetic sequence
  source 1..108: mol_type = other DNA
aattgtaagaagaagcttgggaagctgccacctcagtatgccctggagctcctgacggtctatgcttgggagcgagggagcatgaaaacacatttcaacacagcccag

SEQ ID NO: 198 - DNA, 102 bp, synthetic construct
  misc_feature 1..102: note = synthetic sequence
  source 1..102: mol_type = other DNA
gcccaatgtgcttatggtacataaaaggagtcacactggtgaacgccccttccactgtaaccagtgtggagcttcttttactcagaagggcaaccttctgag

SEQ ID NO: 199 - DNA, 108 bp, synthetic construct
  misc_feature 1..108: note = synthetic sequence
  source 1..108: mol_type = other DNA
cccctgccccccagcatgggtttctgccgcagcgccctgcacccgctgtctctcctggtgcaggccatcatgctggccatgaccctggccctgggtaccttgcctgcc

SEQ ID NO: 200 - DNA, 106 bp, synthetic construct
  misc_feature 1..106: note = synthetic sequence
  source 1..106: mol_type = other DNA
cgcgggctgcggcaagacctacaccaagagttcgcatctgaaggcgcatctgcgcacgcacacaggtgagaagccctaccactgcaactgggacggctgcggctgg

SEQ ID NO: 201 - DNA, 105 bp, synthetic construct
  misc_feature 1..105: note = synthetic sequence
  source 1..105: mol_type = other DNA
ttgcagggtttcaccaggatccacctctgatgttcactgaagagtaccagaaaagtctgctagagcagtaccatctgggtctggatcaaaaacgcagaaaatacg

SEQ ID NO: 202 - DNA, 106 bp, synthetic construct
  misc_feature 1..106: note = synthetic sequence
  source 1..106: mol_type = other DNA
gtcaatgctcaggagccctgtaatggccggactgcccttcacctcgcagtggacctgcaaaatcctgacctggtgtcactcctgttgaagtgtggggctgatgtca

SEQ ID NO: 203 - DNA, 105 bp, synthetic construct
  misc_feature 1..105: note = synthetic sequence
  source 1..105: mol_type = other DNA
gagatggctgtgacccccaaggactcagggacaacagtcagttctgcttgcaaaggatccaccagggtctgattttttatgagaagctgctaggatcggatattt

SEQ ID NO: 204 - DNA, 104 bp, synthetic construct
  misc_feature 1..104: note = synthetic sequence
  source 1..104: mol_type = other DNA
ctgtgtgtgaaatgagtaaacaatctttgcaagtcctaaagaagtgttgggcatttttgcaagaatcttctctgaatccgctgatccagatgcttaaagcagcc

SEQ ID NO: 205 - DNA, 109 bp, synthetic construct
  misc_feature 1..109: note = synthetic sequence
  source 1..109: mol_type = other DNA
atgtgctgctggtggtggtgcctgtctcgctgctcctgatgctggttactctcttctctgcctggcactggtgcccctgctcagggaaaaagaaaaaggatgtccatgc

SEQ ID NO: 206 - DNA, 106 bp, synthetic construct
  misc_feature 1..106: note = synthetic sequence
  source 1..106: mol_type = other DNA
cactgccttcgaagtccggcgccccccgggagggaactgggtggccgcaccctcccggctgcggtggctgtcgccccccaccctgcagccaggactcgatggagaa

SEQ ID NO: 207 - DNA, 107 bp, synthetic construct
  misc_feature 1..107: note = synthetic sequence
  source 1..107: mol_type = other DNA
caaccagacctctacattccattttggaagaagactaaaaatggtgtttccaatgtggacactgaagagacaaattcttatcctttttaacataatcctaatttcca

SEQ ID NO: 208 - DNA, 109 bp, synthetic construct
  misc_feature 1..109: note = synthetic sequence
  source 1..109: mol_type = other DNA
aatgcactgggtcagctgagttctggctccacacccagccccgaggtttatgcagggctcattgatctgtataaatcctcggacctcccgggaggagagttttctacct

SEQ ID NO: 209 - DNA, 108 bp, synthetic construct
  misc_feature 1..108: note = synthetic sequence
  source 1..108: mol_type = other DNA
caaagaagaacatgtgatcatccaggccgagttctatctgaatcctgaccaatcaggcgagtttatgtttgactttgatggtgatgagattttccatgtggatatggc

SEQ ID NO: 210 - DNA, 105 bp, synthetic construct
  misc_feature 1..105: note = synthetic sequence
  source 1..105: mol_type = other DNA
gtaagcacaaaggaagtgaaagtgattgtgctggcaactcctttcaagccaatcctggaagcttcagttatcagaaagcaaaatggagaagaacatgttgtactc

SEQ ID NO: 211 - DNA, 109 bp, synthetic construct
  misc_feature 1..109: note = synthetic sequence
  source 1..109: mol_type = other DNA
gcagaggaggcccaggcagtgccaggagtcaaggcctgttggatctcatcatccatatccctgttgatacgtttacctgctgctcctgaagaagtcgtcatgcctcccg

SEQ ID NO: 212 - DNA, 106 bp, synthetic construct
  misc_feature 1..106: note = synthetic sequence
  source 1..106: mol_type = other DNA
gccctgatgggcagtcaacagctaaaaccttcctcaccgtgtactggactccagaacgggtggaactggcacccctcccctcttggcagccagtgggcaagaacct

SEQ ID NO: 213 - DNA, 108 bp, synthetic construct
  misc_feature 1..108: note = synthetic sequence
  source 1..108: mol_type = other DNA
cgcctgtttgagaagcagcgggcaagaaagacgcaagcccagaggccctgccatttctgtgggctcaggtccctactggctcaggcccctgcctccctcggcaaggcc

SEQ ID NO: 214 - DNA, 108 bp, synthetic construct
  misc_feature 1..108: note = synthetic sequence
  source 1..108: mol_type = other DNA
ttgctcagtaccacgatcctgatgatgaaccagtggccgatccttatgatcagtcctttgaaagcagggacctccttatagatgagtggaaaagcctgacctatgatg

SEQ ID NO: 215 - DNA, 88 bp, synthetic construct
  misc_feature 1..88: note = synthetic sequence
  source 1..88: mol_type = other DNA
ccaggaggcgtctgacacagtatgatgatgaagatcccatggggcagcatcccagtactgatgttgctcctgctcctgggcctaatcg

SEQ ID NO: 216 - DNA, 109 bp, synthetic construct
  misc_feature 1..109: note = synthetic sequence
  source 1..109: mol_type = other DNA
ctgtgcctgtcttcctgggtttgagggtcagaattgtgaagtgaacgtggacgactgtccaggacaccgatgtctcaatggggggacatgcgtggatggcgtcaacacc

SEQ ID NO: 217 - DNA, 108 bp, synthetic construct
  misc_feature 1..108: note = synthetic sequence
  source 1..108: mol_type = other DNA
tccccttcgccaactgggacatcttccgacatggcctggatgctgttgctcatcttgatcatggtccatccaggatcctgtgctctctgggtgtcccagccccctgag

SEQ ID NO: 218 - DNA, 105 bp, synthetic construct
  misc_feature 1..105: note = synthetic sequence
  source 1..105: mol_type = other DNA
ggccgaggtcctgagctggcagttctcctccaccaccaagcgaggactgagcatcgagcagctgactacactggcagagaaactcttgggacctggtgtgaatta

SEQ ID NO: 219 - DNA, 101 bp, synthetic construct
  misc_feature 1..101: note = synthetic sequence
  source 1..101: mol_type = other DNA
ccattctgcgctgctgcaagttacggaatgaaaaattagaacaacagaaacatggaaaacatgttccttcagtcgtcaatgctgacctgcattttcctgct

SEQ ID NO: 220 - DNA, 107 bp, synthetic construct
  misc_feature 1..107: note = synthetic sequence
  source 1..107: mol_type = other DNA
tgcagatctgctgcaactgctggagagccagatgcaggaaaggaacaatgccggcttcctcagctacaacatctacctcactggctgggatgagtctcaggccaatc

SEQ ID NO: 221 - DNA, 106 bp, synthetic construct
  misc_feature 1..106: note = synthetic sequence
  source 1..106: mol_type = other DNA
taatggaatctttattttgtgaaagtagcggggactcatctctggagaaggagttcctcggggccccagtggggccctcggtgagcacccccaacagccagcactc

SEQ ID NO: 222 - DNA, 106 bp, synthetic construct
  misc_feature 1..106: note = synthetic sequence
  source 1..106: mol_type = other DNA
tgccattgcagatgcaaccagagaagatccatttaaagagaaacttctagaaataatgacaaggattcaaacttattgtcaaatgagtccaatgtcagattttgga

SEQ ID NO: 223 - DNA, 103 bp, synthetic construct
  misc_feature 1..103: note = synthetic sequence
  source 1..103: mol_type = other DNA
ggggatcccaggatctcacaatctcagggaccatgggctgtggctgcagctcacacccggaagatgactggatggaaaacatcgatgtgtgtgagaactgcca

SEQ ID NO: 224 - DNA, 109 bp, synthetic construct
  misc_feature 1..109: note = synthetic sequence
  source 1..109: mol_type = other DNA
caaatcaacacaaaccccaagtcctccttgccaggccttcaaccactatctcagtgcaatggcttccatgaggcaggctgaacctgcagatatgcgcccagagatatgg

SEQ ID NO: 225 - DNA, 106 bp, synthetic construct
  misc_feature 1..106: note = synthetic sequence
  source 1..106: mol_type = other DNA
ggagcgcttgccctctcactccgactttctggctgagcttcggaaggcccccgtggtgaactgctccatcgctgtctgccagagaatccagtgtgacatcccgttc

SEQ ID NO: 226 - DNA, 110 bp, synthetic construct
  misc_feature 1..110: note = synthetic sequence
  source 1..110: mol_type = other DNA
gagaaggagcagcaacaactcaactggaagcaggacagtaatcctctctacaaaagtgccatcacgaccaccatcaatcctcgctttcaagaggcagacagtcccactct

SEQ ID NO: 227 - DNA, 104 bp, synthetic construct
  misc_feature 1..104: note = synthetic sequence
  source 1..104: mol_type = other DNA
agtcaagatgaagaaccatttgcttttctggggagtcctggcggtttttattaaggctgttcatgtgaaagcccaagaagatgaaaggattgttcttgttgaca

SEQ ID NO: 228 - DNA, 109 bp, synthetic construct
  misc_feature 1..109: note = synthetic sequence
  source 1..109: mol_type = other DNA
gaagtaaccgcttcacctggatgggactttcagatctaaatcaggaaggcacgtggcaatgggtggacggctcacctctgttgcccagcttcaagcagtattggaacag

SEQ ID NO: 229 - DNA, 104 bp, synthetic construct
  misc_feature 1..104: note = synthetic sequence
  source 1..104: mol_type = other DNA
atacggtttactccactgtggaaataccgaaaaagatggaaaatccccactcactgctcacgatgccagacacaccaaggctatttgcctatgagaatgttatc

SEQ ID NO: 230 - DNA, 107 bp, synthetic construct
  misc_feature 1..107: note = synthetic sequence
  source 1..107: mol_type = other DNA
gcctttaataagctccaagagaaaggcatctacaaagccatgagtgagtttgacatcttcatcaactacatagaagcctacatgacaatgaagatacgaaactgaga

SEQ ID NO: 231 - DNA, 103 bp, synthetic construct
  misc_feature 1..103: note = synthetic sequence
  source 1..103: mol_type = other DNA
gaagcagtgaaatttgacatgggtgcttataagtcatcaaaggatgatgctaaaattaccgtgattctaagaatctcaaaaactcaattgtatgtgactgccc

SEQ ID NO: 232 - DNA, 317 bp, synthetic construct
  misc_feature 1..317: note = synthetic sequence
  source 1..317: mol_type = other DNA
ccctcagtgacccggtgcagctagaagtccatatcggctggctgttgctccaggcccctcggtgggtgttcaaggaggaagaccctattcacctgaggtgtcacagctggaagaacactgctctgcataaggtcacatatttacagaatggcaaaggcaggaagtattttcatcataattctgacttctacattccaaaagccacactcaaagacagcggctcctacttctgcagggggctttttgggagtaaaaatgtgtcttcagagactgtgaacatcaccatcactcaaggtttggcagtgtcaaccatctca

SEQ ID NO: 233 - DNA, 97 bp, synthetic construct
  misc_feature 1..97: note = synthetic sequence
  source 1..97: mol_type = other DNA
caaagactcacttctataaccaccacgagttgaatcaaaattttcaaatgttttcagcagtgtaaagaagcgtcgtgtatacctgtgcaggcactag

SEQ ID NO: 234 - DNA, 105 bp, synthetic construct
  misc_feature 1..105: note = synthetic sequence
  source 1..105: mol_type = other DNA
cccaatgccgaactgggaggcccctttgaccagatgaacggagtggccggagatggcatgatcaacattgacatgactggagagaagaggtcgttggatctccca

SEQ ID NO: 235 - DNA, 103 bp, synthetic construct
  misc_feature 1..103: note = synthetic sequence
  source 1..103: mol_type = other DNA
ccaactttgatgtgcgtgaaattgtaaataacatcaggcgtttgatggatggagaagaacctttgccaatgcttccaagttacaagaacttcaagggtactat

SEQ ID NO: 236 - DNA, 110 bp, synthetic construct
  misc_feature 1..110: note = synthetic sequence
  source 1..110: mol_type = other DNA
gcggcctctactgctgcctggtggtggagatcaggcaccaccactcggagcacagggtccatggtgccatggagctgcaggtgcagacaggcaaagatgcaccatccaac

SEQ ID NO: 237 - DNA, 111 bp, synthetic construct
  misc_feature 1..111: note = synthetic sequence
  source 1..111: mol_type = other DNA
ctttgaaagacatctatacgtggattgaggaccactttccctactttaagcacattgccaagccaggctggaagaactccatccgccacaacctttccctgcacgacatgt

SEQ ID NO: 238 - DNA, 109 bp, synthetic construct
  misc_feature 1..109: note = synthetic sequence
  source 1..109: mol_type = other DNA
tcgcctgaagcagcctgcggactgtctggatggactgtatgccttgatgtcgcggtgctgggagctaaatccccaggaccggccaagttttacagagctgcgggaagat

SEQ ID NO: 239 - DNA, 105 bp, synthetic construct
  misc_feature 1..105: note = synthetic sequence
  source 1..105: mol_type = other DNA
ggagactcaggagttttgagagcaaaatgacaacacccagaaattcagtaaatgggactttcccggcagagccaatgaaaggccctattgctatgcaatctggtc

SEQ ID NO: 240 - DNA, 109 bp, synthetic construct
  misc_feature 1..109: note = synthetic sequence
  source 1..109: mol_type = other DNA
cagcaggctccgggctgaagattgcttctcttctctcctccaaggtctagtgacggagcccgcgcgcggcgccaccatgcggcagaaggcggtatcgcttttcttgtgc

SEQ ID NO: 241 - DNA, 103 bp, synthetic construct
  misc_feature 1..103: note = synthetic sequence
  source 1..103: mol_type = other DNA
tcattatcgaatgtgccagagctgtgtggagctggatccagccaccgtggctggcatcattgtcactgatgtcattgccactctgctccttgctttgggagtc

SEQ ID NO: 242 - DNA, 102 bp, synthetic construct
  misc_feature 1..102: note = synthetic sequence
  source 1..102: mol_type = other DNA
atgctcatctctcacacagacttttgatggacaggagtttctaagtatcatgcctaccaacaagctgtaaaatgatcaccctgaacaatcaagatcaacctg

SEQ ID NO: 243 - DNA, 101 bp, synthetic construct
  misc_feature 1..101: note = synthetic sequence
  source 1..101: mol_type = other DNA
gaggaggaattgaactcaggactcagagtagtccaggtgttctcctcctattcagttcccagaatcaaagcaatgcattttggaaagctcctagcagagag

SEQ ID NO: 244 - DNA, 108 bp, synthetic construct
  misc_feature 1..108: note = synthetic sequence
  source 1..108: mol_type = other DNA
cggcccacgagcggatgccctggtaccacagcagcctgacgcgtgaggaggccgagcgcaaactttactctggggcgcagaccgacggcaagttcctgctgaggccgc

SEQ ID NO: 245 - DNA, 108 bp, synthetic construct
  misc_feature 1..108: note = synthetic sequence
  source 1..108: mol_type = other DNA
gctgtgggccagggggccttgggcgtggaagtgcgagccaaggaccaggacatcttggatctggtgggtgtgctgcacgatcccgagactctgcttcgctgcatcgct

SEQ ID NO: 246 - DNA, 107 bp, synthetic construct
  misc_feature 1..107: note = synthetic sequence
  source 1..107: mol_type = other DNA
gagcttgctcctgctccagttgcggtcatcatgactacgcccgcctcccgcagaccatgttccatgtttcttttaggtatatctttggacttcctcccctgatcctt

SEQ ID NO: 247 - DNA, 102 bp, synthetic construct
  misc_feature 1..102: note = synthetic sequence
  source 1..102: mol_type = other DNA
ggaatcagtaagctaaaaacaaaatcaaccgggaccccagcttttcagaactgcagggaaacagccatcatgagtgaggtcaccaagaattccctggagaaa

SEQ ID NO: 248 - DNA, 101 bp, synthetic construct
  misc_feature 1..101: note = synthetic sequence
  source 1..101: mol_type = other DNA
aaacaaatattttgcagtatgcttccaccaggccccctaccttgtcaccaatacctcacattcctcgaagcccttacaagtttcctagttcacccttacgg

SEQ ID NO: 249 - DNA, 107 bp, synthetic construct
  misc_feature 1..107: note = synthetic sequence
  source 1..107: mol_type = other DNA
agtcttttaatgagtaccgcaaacgctttatgctgaagccctatgaatcatttgaagaacttacaggagaaaaggaaatgtctgcagagttggaagcactctatggt

SEQ ID NO: 250 - DNA, 106 bp, synthetic construct
  misc_feature 1..106: note = synthetic sequence
  source 1..106: mol_type = other DNA
aaagtggagcagcacgtggagctgtaccagaaatacagcaacaattcctggcgatacctcagcaaccggctgctggcacccagcgactcgccagagtggttatctt

SEQ ID NO: 251 - DNA, 108 bp, synthetic construct
  misc_feature 1..108: note = synthetic sequence
  source 1..108: mol_type = other DNA
gtaccgcgacagacatcaccggccccatcatcctgcagacgtaccgcgccattgccaactacgagaagacctcgggctccgagatggctctgtccacgggggacgtgg

SEQ ID NO: 252 - DNA, 104 bp, synthetic construct
  misc_feature 1..104: note = synthetic sequence
  source 1..104: mol_type = other DNA
gggggcctggtccatgtccgcgtcccactagcaggcggagccccccaccccctcagcagggccggagacctagatgtcattgtttccagagaaggagaaaatgg

SEQ ID NO: 253 - DNA, 110 bp, synthetic construct
  misc_feature 1..110: note = synthetic sequence
  source 1..110: mol_type = other DNA
ccaggccaaacagttgcacctgcactggtccgacttgccatataagggctcggagcacagcctcgatggggagcactttgccatggagatgcacatagtacatgagaaag

SEQ ID NO: 254 - DNA, 106 bp, synthetic construct
  misc_feature 1..106: note = synthetic sequence
  source 1..106: mol_type = other DNA
acccttgtgctaagtcaagaggctcaatgggctgcagaagaactagagaaggaccaagcaaagccatgatatttccatggaaatgtcagagcacccagagggactt

SEQ ID NO: 255 - DNA, 98 bp, synthetic construct
  misc_feature 1..98: note = synthetic sequence
  source 1..98: mol_type = other DNA
ggccgtcatcctactgctcctcctcctcctcctcctcttcctcatcctccgacatcgacgtcagggcaaacactggacatcgacccagagaaaggctg

SEQ ID NO: 256 - DNA, 106 bp, synthetic construct
  misc_feature 1..106: note = synthetic sequence
  source 1..106: mol_type = other DNA
gcacttccagagcctgtccggagctcagaggttcggaagacttatcgaccatggagcgcgcgtcctgcttgttgctgctgctgctgccgctggtgcacgtctctgc

SEQ ID NO: 257 - DNA, 106 bp, synthetic construct
  misc_feature 1..106: note = synthetic sequence
  source 1..106: mol_type = other DNA
caccctgcacatcaacacactcgcccgggagctgcttatcgtgccagggcaggtggtggacaggtccacaggcatcggcattgaaggcttctctgagttgatacag

SEQ ID NO: 258 - DNA, 110 bp, synthetic construct
  misc_feature 1..110: note = synthetic sequence
  source 1..110: mol_type = other DNA
tccagccatggctgccattacctgaccagcgccacagccggtctctctgcaggcgccgggagaagtgaccagagcaatttctgcttttcacagggcgggtttctcaacgg

SEQ ID NO: 259 - DNA, 104 bp, synthetic construct
  misc_feature 1..104: note = synthetic sequence
  source 1..104: mol_type = other DNA
gggactgggcagttctagacagtcccgaagttctcaaggcacaggtctcttcctggtttgactgtccttaccccggggaggcagtgcagccagctgcaagcccc

SEQ ID NO: 260 - DNA, 104 bp, synthetic construct
  misc_feature 1..104: note = synthetic sequence
  source 1..104: mol_type = other DNA
tttcatggttctggttgccttggtaggattgggcctggggatgtttcagctcttccacctacagaaggagctggcagaactccgagagtctaccagccagatgc

SEQ ID NO: 261 - DNA, 108 bp, synthetic construct
  misc_feature 1..108: note = synthetic sequence
  source 1..108: mol_type = other DNA
cttttacaccttttctactgtacaccccatcccagacgaagacagtccctggatcaccgacagcacagacagaatccctgctaccactttgatgagcactagtgctac

SEQ ID NO: 262 - DNA, 107 bp, synthetic construct
  misc_feature 1..107: note = synthetic sequence
  source 1..107: mol_type = other DNA
tggccaagaggaaggtgcctatggctggattactatcaactatctgctgggcaaattcagtcagaaaacaaggtggttcagcatagtcccatatgaaaccaataatc

SEQ ID NO: 263 - DNA, 107 bp, synthetic construct
  misc_feature 1..107: note = synthetic sequence
  source 1..107: mol_type = other DNA
ggagacatggaggaggaagaggctgaggggaagatggaagaaggagggaaggaaggagaaatctttgcttttgggtaatcaggtgtttctagctgtgtacagggact

SEQ ID NO: 264 - DNA, 105 bp, synthetic construct
  misc_feature 1..105: note = synthetic sequence
  source 1..105: mol_type = other DNA
ggtcttgaaggacactgggatcctgtaacacagccccggatatctgtgttaccagccttgtctcggccacctcaaggataatcactaaattctgccgaaaggact

SEQ ID NO: 265 - DNA, 105 bp, synthetic construct
  misc_feature 1..105: note = synthetic sequence
  source 1..105: mol_type = other DNA
tgtagcaaaccctcaagctgaggggcagctccagtggctgaaccgccgggccaatgccctcctggccaatggcgtggagctgagagataaccagctggtggtgcc

SEQ ID NO: 266 - DNA, 105 bp, synthetic construct
  misc_feature 1..105: note = synthetic sequence
  source 1..105: mol_type = other DNA
ttctgcagctctgtgtgaaggtgcagttttgccaaggagtgctaaagaacttagatgtcagtgcataaagacatactccaaacctttccaccccaaatttatcaa

SEQ ID NO: 267 - DNA, 100 bp, synthetic construct
  misc_feature 1..100: note = synthetic sequence
  source 1..100: mol_type = other DNA
tgtgttacagtgggctgaaaaaggatactacaccatgagcaacaacttggtaaccctggaaaatgggaaacagctgaccgttaaaagacaaggactctat

SEQ ID NO: 268 - DNA, 103 bp, synthetic construct
  misc_feature 1..103: note = synthetic sequence
  source 1..103: mol_type = other DNA
tcccagacgcggaggttggggtcatggcgccccgaagcctcctcctgctgctctcaggggccctggccctgaccgatacttgggcgggctcccactccttgag

SEQ ID NO: 269 - DNA, 108 bp, synthetic construct
  misc_feature 1..108: note = synthetic sequence
  source 1..108: mol_type = other DNA
ctgtgcaacgcctgcgggctctatcacaaaatgaacggacagaaccggcccctcattaagcccaagcgaaggctgtctgcagccaggagagcagggacgtcctgtgcg

SEQ ID NO: 270 - DNA, 102 bp, synthetic construct
  misc_feature 1..102: note = synthetic sequence
  source 1..102: mol_type = other DNA
aaggtgtgagttggccagaactctgaaaagattgggaatggatggctacaggggaatcagcctagcaaactggatgtgtttggccaaatgggagagtggtta

SEQ ID NO: 271 - DNA, 104 bp, synthetic construct
  misc_feature 1..104: note = synthetic sequence
  source 1..104: mol_type = other DNA
aaaggctggtctgcttgagaaacttaaagaacaagagtgtgatgtgaaggattatggggacctgccctttgctgacatccctaatgacagtccctttcaaattg

SEQ ID NO: 272 - DNA, 108 bp, synthetic construct
  misc_feature 1..108: note = synthetic sequence
  source 1..108: mol_type = other DNA
cccagctgagctcagagcatggaggagacgtccagaagtggctctcttcgcccttcccctcatcgtccttcagccctggcggcctggcacctgagatctcgccactag

SEQ ID NO: 273 - DNA, 108 bp, synthetic construct
  misc_feature 1..108: note = synthetic sequence
  source 1..108: mol_type = other DNA
tgccgtgggcatgggccgcgctgagcaggtcatctttgtccgagagacccccaacacagcaggcgcaggggccacaggcggcatcatcgggggcatcatcgccgccat

SEQ ID NO: 274 - DNA, 108 bp, synthetic construct
  misc_feature 1..108: note = synthetic sequence
  source 1..108: mol_type = other DNA
gcccggaagatcgtgggggccatggtccagatcatcacttaccgggactacctgcccctggtgctggggccaacggccatgaggaagtacctgcccacgtaccgttcc

SEQ ID NO: 275 - DNA, 98 bp, synthetic construct
  misc_feature 1..98: note = synthetic sequence
  source 1..98: mol_type = other DNA
tgctgagaagcctgacataccaggactgcctgagacaagccacaagctgaacagagaaagtggattgaacaaggacgcatttccccagtacatccaca

SEQ ID NO: 276 - DNA, 105 bp, synthetic construct
  misc_feature 1..105: note = synthetic sequence
  source 1..105: mol_type = other DNA
ctgtacttcagggccgtacactgctcaaatcattcctggtacaggaaacaagcttctgatgtcttctcctaattgtgagatatattatcaaagtcctttatcact

SEQ ID NO: 277 - DNA, 102 bp, synthetic construct
  misc_feature 1..102: note = synthetic sequence
  source 1..102: mol_type = other DNA
gccatccgcatcccgctccggtacaatggcttggtgaccggcacgagggctaagggcatcattgccatctgctgggtgctgtcgtttgccatcggcctgact

SEQ ID NO: 278 - DNA, 110 bp, synthetic construct
  misc_feature 1..110: note = synthetic sequence
  source 1..110: mol_type = other DNA
gacgtccgtgatgagaaggtcaaggtgttgaaatgcatctcagaggtgcaggccaacaatgtggtcctgggccagtacgtggggaaccccgatggagagggcgaggccac

SEQ ID NO: 279 - DNA, 105 bp, synthetic construct
  misc_feature 1..105: note = synthetic sequence
  source 1..105: mol_type = other DNA
ctggaccactagtatttcaggtatgctgctgaaagtgggaatcctctacattggtgggcagctggtgaccagtggggctgtaagcagtgggaaccttgtcacatt

SEQ ID NO: 280 - DNA, 104 bp, synthetic construct
  misc_feature 1..104: note = synthetic sequence
  source 1..104: mol_type = other DNA
cgaagtggacatcgcaaaagctgatccagctgctgcatcccaccctctattactgaatggagatgctactgtggcccagaaaaatccaggctcggtggctgaga

SEQ ID NO: 281 - DNA, 101 bp, synthetic construct
  misc_feature 1..101: note = synthetic sequence
  source 1..101: mol_type = other DNA
gctgagcaccccagtggctgaggccagagactttcccaaggatttcttggtccagtttaagggcatgtgctacttcaccaacgggacagagcgcgtgcgcg

SEQ ID NO: 282 - DNA, 108 bp, synthetic construct
  misc_feature 1..108: note = synthetic sequence
  source 1..108: mol_type = other DNA
ccgggggtctccttctctcctgaccaccacacccggccccactgtgagagctgtcggcactgtaactctggtcttctcgttcgcaactgcaccatcactgccaatgct

SEQ ID NO: 283 - DNA, 109 bp, synthetic construct
  misc_feature 1..109: note = synthetic sequence
  source 1..109: mol_type = other DNA
catccctgaggctgcagcgcgtgcgtgtggcggacgagggcagcttcacctgcttcgtgagcatccgggatttcggcagcgctgccgtcagcctgcaggtggccgctcc

SEQ ID NO: 284 - DNA, 107 bp, synthetic construct
  misc_feature 1..107: note = synthetic sequence
  source 1..107: mol_type = other DNA
gggactgtgaggggcgcttctgactttggacttgagcactgcctgggacctgtgctgagagagcgctagcatgtctcagtggaatcaagtccaacagttagaaatca

SEQ ID NO: 285 - DNA, 110 bp, synthetic construct
  misc_feature 1..110: note = synthetic sequence
  source 1..110: mol_type = other DNA
tctgcgcactgctggacacccccttacccgctgggcccttcagcgccagccacccagccccaagcaactggaagaagaattcttgaagatcccttcaaactttgtcagcc

SEQ ID NO: 286 - DNA, 107 bp, synthetic construct
  misc_feature 1..107: note = synthetic sequence
  source 1..107: mol_type = other DNA
gacaaccaccctcagccttgcacaccacagctctgctgccttacctgcacgcacctccaacaccaccatcacagcgaacacctcagatgcctaccttaatgcctctg

SEQ ID NO: 287 - DNA, 107 bp, synthetic construct
  misc_feature 1..107: note = synthetic sequence
  source 1..107: mol_type = other DNA
atcagctataaatatcgagaggacttgtctgcacatctcatggtagctggctgggaccaacgtgaaggaggtcaggtatatggaaccctgggaggaatgctgactcg

SEQ ID NO: 288 - DNA, 105 bp, synthetic construct
  misc_feature 1..105: note = synthetic sequence
  source 1..105: mol_type = other DNA
ctcaggactgtcagaatgcccatcaggaattcagattttggccgtttttggtgatcatcgtgattctaagcgcactgttccttggcacccttgcctgcttctgtg

SEQ ID NO: 289 - DNA, 108 bp, synthetic construct
  misc_feature 1..108: note = synthetic sequence
  source 1..108: mol_type = other DNA
ggggatcagtatatacacttcagataactacaccgaggaaatgggctcaggggactatgactccatgaaggaaccctgtttccgtgaagaaaatgctaatttcaataa

SEQ ID NO: 290 - DNA, 101 bp, synthetic construct
  misc_feature 1..101: note = synthetic sequence
  source 1..101: mol_type = other DNA
tttgtcaggacaagggctcagaggactggacgtgctcagacatcggtgttcttcttcccagttcttgacccctggtcctgtctccagcccgtcttggctta

SEQ ID NO: 291 - DNA, 103 bp, synthetic construct
  misc_feature 1..103: note = synthetic sequence
  source 1..103: mol_type = other DNA
atccagcgtttcgtagaaaccccagctcatttctcttggaaagaaagttattaccgatccaccatgtcccagagcacacagacaaatgaattcctcagtccag

SEQ ID NO: 292 - DNA, 109 bp, synthetic construct
  misc_feature 1..109: note = synthetic sequence
  source 1..109: mol_type = other DNA
tatgcttgtgccccacctgagtcccaggctcccggagtccccacagagccaagcataaggtctgccgaagccttggcgttctcagactgccggctgcacatctgcctgt

SEQ ID NO: 293 - DNA, 105 bp, synthetic construct
  misc_feature 1..105: note = synthetic sequence
  source 1..105: mol_type = other DNA
tcatagctgactactttgagacgagcagccagtgctccaagcccggtgtcatcttcctaaccaagcgaagccggcaggtctgtgctgaccccagtgaggagtggg

SEQ ID NO: 294 - DNA, 98 bp, synthetic construct
  misc_feature 1..98: note = synthetic sequence
  source 1..98: mol_type = other DNA
tattctgaaaccagcccccagtgccccaagccaggtgtcatcctcctaaccaagagaggccggcagatctgtgctgaccccaataagaagtgggtcca

SEQ ID NO: 295 - DNA, 107 bp, synthetic construct
  misc_feature 1..107: note = synthetic sequence
  source 1..107: mol_type = other DNA
ttaatacatcacacttgcaaaagaagtatgtaaaagttttaatgcacgatgtagcttaccgccaggaaaaggatgaaaacaaatggacgcatgtgaatttatccagc

SEQ ID NO: 296 - DNA, 105 bp, synthetic construct
  misc_feature 1..105: note = synthetic sequence
  source 1..105: mol_type = other DNA
acaggattcctgagctgaaatgcagatgaccacattcaaggaagaactttctgccccggctttgcaggatgaaaagctttcctgcttggcagttattcttccaca

SEQ ID NO: 297 - DNA, 102 bp, synthetic construct
  misc_feature 1..102: note = synthetic sequence
  source 1..102: mol_type = other DNA
gtgaaatacagaacccagcgagtgcaaacttcagtgacccagtcaccctgaatgtcctctatggcccagatgcccccaccatttccccttcagacacctatt

SEQ ID NO: 298 - DNA, 105 bp, synthetic construct
  misc_feature 1..105: note = synthetic sequence
  source 1..105: mol_type = other DNA
aatttactgaaagcagttagcaaggaaaggtctaaaagatctccttaaaaccagaggggagcaaaatcgatgcagtgcttccaaggatggaccacacagaggctg

SEQ ID NO: 299 - DNA, 104 bp, synthetic construct
  misc_feature 1..104: note = synthetic sequence
  source 1..104: mol_type = other DNA
gcaagtgtcccaaagaagctgtgatcttcaagaccattgtggccaaggagatctgtgctgaccccaagcagaagtgggttcaggattccatggaccacctggac

SEQ ID NO: 300 - DNA, 98 bp, synthetic construct
  misc_feature 1..98: note = synthetic sequence
  source 1..98: mol_type = other DNA
tgccttgaagaaaaaggaccaatgttcgaactacttccaggtgaatccaacaagatcccccgtctgaggactgacctttttccaaagacgagaatcca

SEQ ID NO: 301 - DNA, 984 bp, synthetic construct
  misc_feature 1..984: note = synthetic sequence
  source 1..984: mol_type = other DNA
tggggggcttctacctgtgccagccggggcccccctctgagaaggcctggcagcctggctggacagtcaatgtggagggcagcggggagctgttccggtggaatgtttcggacctaggtggcctgggctgtggcctgaagaacaggtcctcagagggccccagctccccttccgggaagctcatgagccccaagctgtatgtgtgggccaaagaccgccctgagatctgggagggagagcctccgtgtctcccaccgagggacagcctgaaccagagcctcagccaggacctcaccatggcccctggctccacactctggctgtcctgtggggtaccccctgactctgtgtccaggggccccctctcctggacccatgtgcaccccaaggggcctaagtcattgctgagcctagagctgaaggacgatcgcccggccagagatatgtgggtaatggagacgggtctgttgttgccccgggccacagctcaagacgctggaaagtattattgtcaccgtggcaacctgaccatgtcattccacctggagatcactgctcggccagtactatggcactggctgctgaggactggtggctggaaggtctcagctgtgactttggcttatctgatcttctgcctgtgttcccttgtgggcattcttcatcttcaaagagccctggtcctgaggaggaaaagaaagcgaatgactgaccccaccaggagattcttcaaagtgacgcctcccccaggaagcgggccccagaaccagtacgggaacgtgctgtctctccccacacccacctcaggcctcggacgcgcccagcgttgggccgcaggcctggggggcactgccccgtcttatggaaacccgagcagcgacgtccaggcggatggagccttggggtcccggagcccgccgggagtgggcccagaagaagaggaaggggagggctatgaggaacctgacagtgaggaggactccg

SEQ ID NO: 302 - DNA, 98 bp, synthetic construct
  misc_feature 1..98: note = synthetic sequence
  source 1..98: mol_type = other DNA
ctcaatgaaagacgatttggagaatgtaaaaagtcttggaacagatctgatgaatgaaatgaggaggattacttcggacttcagaattggatttggct

SEQ ID NO: 303 - DNA, 100 bp, synthetic construct
  misc_feature 1..100: note = synthetic sequence
  source 1..100: mol_type = other DNA
cgtgaagtctagggacaggaagatggttggcgacgtgaccggggcccaggcctatgcctccaccgccaagtgcctgaacatctgggccctgattctgggc

SEQ ID NO: 304 - DNA, 107 bp, synthetic construct
  misc_feature 1..107: note = synthetic sequence
  source 1..107: mol_type = other DNA
aagggctccaaaggctgcaagaggactgagcggtcacagacccctaaagggccatagcccagtgagcagcctggagccctggagaccccaccagcctcaccagcgct

SEQ ID NO: 305 - DNA, 105 bp, synthetic construct
  misc_feature 1..105: note = synthetic sequence
  source 1..105: mol_type = other DNA
ggaaccacagacaatctgtgctccagaggttatgaagccatgtatacgctactaggcaatgccaatggagcaacctgtgcattcccgttcaagtttgaaaacaag

SEQ ID NO: 306 - DNA, 100 bp, synthetic construct
  misc_feature 1..100: note = synthetic sequence
  source 1..100: mol_type = other DNA
gcccatcctgtgtctccctgctgcgctgcaccggctgctgcggcgatgagaatctgcactgtgtgccggtggagacggccaatgtcaccatgcagctcct

SEQ ID NO: 307 - DNA, 103 bp, synthetic construct
  misc_feature 1..103: note = synthetic sequence
  source 1..103: mol_type = other DNA
ccagaacacctatctgagtggcctgtgttacctcttccgccagaatctgcagggtcccatgctgcaggggcgccctggttttcaggaatgtatcaagggcaac

SEQ ID NO: 308 - DNA, 100 bp, synthetic construct
  misc_feature 1..100: note = synthetic sequence
  source 1..100: mol_type = other DNA
tgtggctgaataagcggtgttcatgatttcttttattctttgcacaacaacaacaacaacaaattcacggaatcttttaagtgctgaacttatttttcaa

SEQ ID NO: 309 - DNA, 107 bp, synthetic construct
  misc_feature 1..107: note = synthetic sequence
  source 1..107: mol_type = other DNA
cgtgggcccgggaaggtcggaagaagtgttcctgcaagtgcagtatgccccggaaccttccacggttcagatcctccactcaccggctgtggagggaagtcaagtcg

SEQ ID NO: 310 - DNA, 106 bp, synthetic construct
  misc_feature 1..106: note = synthetic sequence
  source 1..106: mol_type = other DNA
tctgaggactgctccagggatgccatcgtttttgtaactgtgcagggcagggccatctgttcggaccccaacaacaagagagtgaagaatgcagttaaatacctgc

SEQ ID NO: 311 - DNA, 106 bp, synthetic construct
  misc_feature 1..106: note = synthetic sequence
  source 1..106: mol_type = other DNA
atatctttcaacaaatctctatatgagggactgaatgcagagaaccacagaactaagatcactgtcgtcttcctgaaagatgagaagtaccattctttgcctatca

SEQ ID NO: 312 - DNA, 100 bp, synthetic construct
  misc_feature 1..100: note = synthetic sequence
  source 1..100: mol_type = other DNA
gacctgggaccttaacagaaatgtgaccgatatcgagtgtgttaaagacgccgactattctatgccggcagtgaacaatagctattgccagtttggagca

SEQ ID NO: 313 - DNA, 104 bp, synthetic construct
  misc_feature 1..104: note = synthetic sequence
  source 1..104: mol_type = other DNA
aggtatgcctgtgtcaagatgaggtcacggacgattacatcggagacaacaccacagtggactacactttgttcgagtctttgtgctccaagaaggacgtgcgg

SEQ ID NO: 314 - DNA, 104 bp, synthetic construct
  misc_feature 1..104: note = synthetic sequence
  source 1..104: mol_type = other DNA
tatggtttaagaagcactgctcatatcaggacatcctgtgagactcttccccctgactcccccattgtgttaagaacccagcaacccaggagcctagtacaata

SEQ ID NO: 315 - DNA, 106 bp, synthetic construct
  misc_feature 1..106: note = synthetic sequence
  source 1..106: mol_type = other DNA
tccctggccatggcgctgcagctctcccgggagcagggaatcaccctgcgcgggagcgccgaaatcgtggccgagttcttctcattcggcatcaacagcattttat

SEQ ID NO: 316 - DNA, 111 bp, synthetic construct
  misc_feature 1..111: note = synthetic sequence
  source 1..111: mol_type = other DNA
gcagcctatggatacggcattcggtatgaatatgggattttcaatcagaagatccgagatggatggcaggtagaagaagcagatgattggctcagatatggaaacccttgg

SEQ ID NO: 317 - DNA, 107 bp, synthetic construct
  misc_feature 1..107: note = synthetic sequence
  source 1..107: mol_type = other DNA
cacactgccaccagcacaaatactgcgaccccaacctagggcttcgggtccagcagaagggcacctcagaaacagacaccatctgcacctgtgaagaaggctggcac

SEQ ID NO: 318 - DNA, 101 bp, synthetic construct
  misc_feature 1..101: note = synthetic sequence
  source 1..101: mol_type = other DNA
atcaccccaacctcacatgcacagccagcaaccctgtcagcaggagttcccaccagtttctttctgagaacatctgttcaggacctgagagaaacacaaag

SEQ ID NO: 319 - DNA, 325 bp, synthetic construct
  misc_feature 1..325: note = synthetic sequence
  source 1..325: mol_type = other DNA
gcagaccctgcgcggctactacaaccagagcgaggccagttctcacaccctccagtggatgattggctgcgacctggggtccgacggacgcctcctccgcgggtatgaacagtatgcctacgatggcaaggattacctcgccctgaacgaggacctgcgctcctggaccgcagcggacactgcggctcagatctccaagcgcaagtgtgaggcggccaatgtggctgaacaaaggagagcctacctggagggcacgtgcgtggagtggctccacagatacctggagaacgggaaggagatgctgcagcgcgcggacccccccaag

SEQ ID NO: 320 - DNA, 102 bp, synthetic construct
  misc_feature 1..102: note = synthetic sequence
  source 1..102: mol_type = other DNA
ttgaactagaagcaattgttaacagcatcaaaagaagcagaaaaattatttttgttataacacaccatctattaaaagacccattatgcaaaagattcaagg

SEQ ID NO: 321 - DNA, 103 bp, synthetic construct
  misc_feature 1..103: note = synthetic sequence
  source 1..103: mol_type = other DNA
gcagcaagaatggcacggtctgcctcagtccaccctgtaccctggcccggtcctttggagtagaatggattgcaagttggctagtggtcacggtgcccaccat

SEQ ID NO: 322 - DNA, 104 bp, synthetic construct
  misc_feature 1..104: note = synthetic sequence
  source 1..104: mol_type = other DNA
ggagtaccaccaagccacgggcaccctcagtgcccacttcaggaacatgtcactgaagaggatcaagcgtgctgaccggcggggtgcagagtccgtgacagagg

SEQ ID NO: 323 - DNA, 105 bp, synthetic construct
  misc_feature 1..105: note = synthetic sequence
  source 1..105: mol_type = other DNA
caaaaggcagacagcgggcactaccactgcagtggcatcttccagagccctggtcctgggatcccagaaacagcatctgttgtggctatcacagtccaagaactg

SEQ ID NO: 324 - DNA, 107 bp, synthetic construct
  misc_feature 1..107: note = synthetic sequence
  source 1..107: mol_type = other DNA
cactctggagagaagccctacaaatgcgaaacctgcggagccagatttgtacaggtggcccacctccgtgcccatgtgcttatccacactggtgagaagccctatcc

SEQ ID NO: 325 - DNA, 101 bp, synthetic construct
  misc_feature 1..101: note = synthetic sequence
  source 1..101: mol_type = other DNA
ccccaggtgtaagcgcagaaagcaggcgaacccgcggcgcaataacgttacaaattataatactgtggtagaaacaaattcagattcagatgatgaagaca

SEQ ID NO: 326 - DNA, 109 bp, synthetic construct
  misc_feature 1..109: note = synthetic sequence
  source 1..109: mol_type = other DNA
actgccctctgcgctcctgcatctgcctccccatattcctcggacaccacaccctgctgctttgcctacattgcccgcccactgccccgtgcccacatcaaggagtatt

SEQ ID NO: 327 - DNA, 101 bp, synthetic construct
  misc_feature 1..101: note = synthetic sequence
  source 1..101: mol_type = other DNA
ctggccagcttcgagaaagagttgagaagttaaacatgctcagcattgatcatctcacagaccacaagtcacagcgccttgcacgtctagttctgggatgc

SEQ ID NO: 328 - DNA, 106 bp, synthetic construct
  misc_feature 1..106: note = synthetic sequence
  source 1..106: mol_type = other DNA
cagcttcgggaagaggaaaggaacctcagaccttccagatcgcttcctctcgcaacaaactatttgtcgcaggaataaagatggctgctgaaccagtagaagacaa

SEQ ID NO: 329 - DNA, 104 bp, synthetic construct
  misc_feature 1..104: note = synthetic sequence
  source 1..104: mol_type = other DNA
gttgttaaacggggcagaaagaaactcctgtatatattcaaacaaccatttatgagaccagtacaaactactcaagaggaagatggctgtagctgccgatttcc

SEQ ID NO: 330 - DNA, 102 bp, synthetic construct
  misc_feature 1..102: note = synthetic sequence
  source 1..102: mol_type = other DNA
ggtggatatgtctgggttgaaactcaagcaactgtcatatataacaccaagaattctcaaccacagtgcattgtatgtgtgaattacgttgtgagtggtatt

SEQ ID NO: 331 - DNA, 105 bp, synthetic construct
  misc_feature 1..105: note = synthetic sequence
  source 1..105: mol_type = other DNA
ggtgctgctcacatctgtggtccagggcagggccactccagagaattaccttttccagggacggcaggaatgctacgcgtttaatgggacacagcgcttcctgga

SEQ ID NO: 332 - DNA, 105 bp, synthetic construct
  misc_feature 1..105: note = synthetic sequence
  source 1..105: mol_type = other DNA
aaggataagggtgacagcaacagctcggcgggctggaagaattcaattcgtcataatctgtccctacacagcaagttcattcgtgtgcagaatgaaggaactgga

SEQ ID NO: 333 - DNA, 106 bp, synthetic construct
  misc_feature 1..106: note = synthetic sequence
  source 1..106: mol_type = other DNA
cttctttcggatggagagaggaagtaccaaatacagttacaaatctccccagctctctgtgcatgtgacagacttgacccacaggcccaaaatcctcatccctggc

SEQ ID NO: 334 - DNA, 106 bp, synthetic construct
  misc_feature 1..106: note = synthetic sequence
  source 1..106: mol_type = other DNA
tctgcaaaattttctcaagaaggagaataagaatgaaaaggtcatagaacacatcatggaggacctggacacaaatgcagacaagcagctgagcttcgaggagttc

SEQ ID NO: 335 - DNA, 108 bp, synthetic construct
  misc_feature 1..108: note = synthetic sequence
  source 1..108: mol_type = other DNA
ggggctcctgagcccatccttcgggactggacacctgggctgtcccccatgcagaccctgaaggtttctgtgtctgcagtgactctgggcctgggcctcatcatcttc

SEQ ID NO: 336 - DNA, 100 bp, synthetic construct
  misc_feature 1..100: note = synthetic sequence
  source 1..100: mol_type = other DNA
acacggaatgtgaaggcccagtcacagactgaccgagtggacctggggaccctgcgcggctactacaaccagagcgaggccggttctcacaccatccaga

SEQ ID NO: 337 - DNA, 106 bp, synthetic construct
  misc_feature 1..106: note = synthetic sequence
  source 1..106: mol_type = other DNA
taccttgtgtttgcaagatctgcggcaaggcgttttccagaccctggttgcttcaaggacacattagaactcacacgggggagaagcctttttcttgccctcactg

SEQ ID NO: 338 - DNA, 105 bp, synthetic construct
  misc_feature 1..105: note = synthetic sequence
  source 1..105: mol_type = other DNA
tattttgacagtttgttgcatgcttgcataccttgtcaacttcgatgttcttctaatactcctcctctaacatgtcagcgttattgtaatgcaagtgtgaccaat

SEQ ID NO: 339 - DNA, 106 bp, synthetic construct
  misc_feature 1..106: note = synthetic sequence
  source 1..106: mol_type = other DNA
ggcccaatgggctaagcctggacatcccggctgggcgcctctactgggtggatgccttctacgaccgcatcgagacgatactgctcaatggcacagaccggaagat

SEQ ID NO: 340 - DNA, 168 bp, synthetic construct
  misc_feature 1..168: note = synthetic sequence
  source 1..168: mol_type = other DNA
cgcagcttgagactggcggagggaagcccgcccaggctctataaggagacaaggttctgagcagacaggccaaccggaggacaggattccctggaggccacagaggagcaccaaggagaagatctgcctgtgggtccccattgcccagcttttgcctgcactcttgcc

SEQ ID NO: 341 - DNA, 345 bp, synthetic construct
  misc_feature 1..345: note = synthetic sequence
  source 1..345: mol_type = other DNA
ttcctcccttctgctgatgagatttatgactgcaaggtggagcactggggcctggaccagcctcttctgaaacactgggagcctgagattccagcccctatgtcagagctcacagagactgtggtctgtgccctggggttgtctgtgggcctcatgggcattgtggtgggcactgtcttcatcatccaaggcctgcgttcagttggtgcttccagacaccaagggccattgtgaatcccatcctggaagggaaggtgcatcgccatctacaggagcagaagaatggacttgctaaatgacctagcactattctctggcccgatttatcatatcccttttctcctc

SEQ ID NO: 342 - DNA, 107 bp, synthetic construct
  misc_feature 1..107: note = synthetic sequence
  source 1..107: mol_type = other DNA
ggcctccttgagtcagggaagtcggaactgaagaagcaagtgaagcccaaggcctggctgtcccgtggccccagtcctggccctggccgtctgctgctggtgtgcca

SEQ ID NO: 343 - DNA, 105 bp, synthetic construct
  misc_feature 1..105: note = synthetic sequence
  source 1..105: mol_type = other DNA
atgagaagcgtatggccacagaagttgctgctgacgctctgggtgaagaatggaagggttatgtggtccgaatcagtggtgggaacgacaaacaaggtttcccca

SEQ ID NO: 344 - DNA, 105 bp, synthetic construct
  misc_feature 1..105: note = synthetic sequence
  source 1..105: mol_type = other DNA
ctcttctgaccctgatgagaaagctcaagattccaaggcctattcaaaaatcactgaaggaaaagtttcaggaaatcctcaggtacatatcaagaatgtcaaaga

SEQ ID NO: 345 - DNA, 108 bp, synthetic construct
  misc_feature 1..108: note = synthetic sequence
  source 1..108: mol_type = other DNA
gtatggcggacatcacgtttgtggaggtgttctgattgatccacagtgggtgctgacagcagcccactgccaatatcggtttaccaaaggccagtctcccactgtggt

SEQ ID NO: 346 - DNA, 106 bp, synthetic construct
  misc_feature 1..106: note = synthetic sequence
  source 1..106: mol_type = other DNA
gatgcctgggggtccaggagtcctccaagctctgcctgccaccatcttcctcctcttcctgctgtctgctgtctacctgggccctgggtgccaggccctgtggatg

SEQ ID NO: 347 - DNA, 109 bp, synthetic construct
  misc_feature 1..109: note = synthetic sequence
  source 1..109: mol_type = other DNA
accatccaaaagtacggcaccaaccccgaggagaccgcggccgaggagagctgggactatgtgcagttccagctgcgctgctgcggctggcactacccgcaggactggt

SEQ ID NO: 348 - DNA, 108 bp, synthetic construct
  misc_feature 1..108: note = synthetic sequence
  source 1..108: mol_type = other DNA
gcagtggtatagcatatcctcacatttctagtgcccttgagactgtgctatggaaccaatcttgaacatacatgcattgacttgacaagttactgagtaagcagcata

SEQ ID NO: 349 - DNA, 106 bp, synthetic construct
  misc_feature 1..106: note = synthetic sequence
  source 1..106: mol_type = other DNA
tgactttctcaggatgatgctgggcaagagatctgccatcctaaaaatgatcctgatgtatgaggaaaaagcgagagaaaaggaaaagccaacaggccccccagcc

SEQ ID NO: 350 - DNA, 95 bp, synthetic construct
  misc_feature 1..95: note = synthetic sequence
  source 1..95: mol_type = other DNA
accagagagaagccgggatggaaactccaaacaccacagaggactatgacacgaccacagagtttgactatggggatgcaactccgtgccagaag

SEQ ID NO: 351 - DNA, 104 bp, synthetic construct
  misc_feature 1..104: note = synthetic sequence
  source 1..104: mol_type = other DNA
caaggaatctgcttttcaagtatgccaccaacagtgaagaggttattggagtgatgagtaaagaatacataccaaagggcacacgttttggacccctaataggt

SEQ ID NO: 352 - DNA, 105 bp, synthetic construct
  misc_feature 1..105: note = synthetic sequence
  source 1..105: mol_type = other DNA
ctacagggatattaatattacttcactactatgtgtttagtacagcgattggattaacctccttcgtcattgccatattggttattcaggtgatagcctatatcc

SEQ ID NO: 353 - DNA, 109 bp, synthetic construct
  misc_feature 1..109: note = synthetic sequence
  source 1..109: mol_type = other DNA
aagcccactgacgctccaccgaaagtactgaccaagtgccaggaagaggtcagccacatccctgctgtccacccgggttcattcaggcccaagtgcgacgagaacggca

SEQ ID NO: 354 - DNA, 108 bp, synthetic construct
  misc_feature 1..108: note = synthetic sequence
  source 1..108: mol_type = other DNA
ggatgtgagccaggcccaggctgggacctacacctgccatatccatctgcaggaacagcagctcaatgccactgtcacattggcaatcatcacagtgactcccaaatc

SEQ ID NO: 355 - DNA, 85 bp, synthetic construct
  misc_feature 1..85: note = synthetic sequence
  source 1..85: mol_type = other DNA
cctcagaagtgggagtgagcggaagcagctgtgcacggccacacaggacacagtctgccgctgccgggcgggcacccagcccctg

SEQ ID NO: 356 - DNA, 102 bp, synthetic construct
  misc_feature 1..102: note = synthetic sequence
  source 1..102: mol_type = other DNA
tcaatatatgatacaaaaggaaaaaatgtgttggaaaaaatatttgatttgaagattcaagagagggtctcaaaaccaaagatctcctggacttgtatcaac

SEQ ID NO: 357 - DNA, 99 bp, synthetic construct
  misc_feature 1..99: note = synthetic sequence
  source 1..99: mol_type = other DNA
gctgccttctgctctccagcgctctcagcaccaatgggctcagaccctcccaccgcctgctgcttttcttacactgcgaggaagcttcctcgcaacttt

SEQ ID NO: 358 - DNA, 117 bp, synthetic construct
  misc_feature 1..117: note = synthetic sequence
  source 1..117: mol_type = other DNA
ggcctgagcggtaggagtggggctggagcagtaagatggcggccagagcggtttttctggcattgtctgcccagctgctccaagccaggctgatgaaggaggagtcccctgtggtga

SEQ ID NO: 359 - DNA, 101 bp, synthetic construct
  misc_feature 1..101: note = synthetic sequence
  source 1..101: mol_type = other DNA
ctccaaggggtcaggtgcaaaggcctgccagatgattatgggaagctggaacccagtaggtgtgggccgctacctcaacacctggctgatggagacaaagg

SEQ ID NO: 360 - DNA, 92 bp, synthetic construct
  misc_feature 1..92: note = synthetic sequence
  source 1..92: mol_type = other DNA
tttctacaaccagcttgcattttttctgcccacaatgagcggggaatcaatgaatttcagcgatgttttcgactccagtgaagattattttg

SEQ ID NO: 361 - DNA, 104 bp, synthetic construct
  misc_feature 1..104: note = synthetic sequence
  source 1..104: mol_type = other DNA
gcatccagcgcttcgcacaggctcagcagcagctgccgctcgagtcacttgggtgggacgtagctgagctgcagctgaatcacacaggacctcagcaggacccc

SEQ ID NO: 362 - DNA, 111 bp, synthetic construct
  misc_feature 1..111: note = synthetic sequence
  source 1..111: mol_type = other DNA
ggtgactgatgatctaagtttcccgaggtttctcagagcctctctggttctttcactggtgaccagccagcccctcctctttcttcctccggtgctggcggaagagccccc

SEQ ID NO: 363 - DNA, 247 bp, synthetic construct
  misc_feature 1..247: note = synthetic sequence
  source 1..247: mol_type = other DNA
gctgcagatgcggggccagggggccggagagccgcctgcttgagttctacctcgccatgcctttcgcgacacccatggaagcagagctggcccgcaggagcctggcccaggatgccccaccgcttcccgtgccaggggtgcttctgaaggagttcactgtgtccggcaacatactgactatccgactgactgctgcagaccaccgccaactgcagctctccatcagctcctgtctccagcagctttc

SEQ ID NO: 364 - DNA, 356 bp, synthetic construct
  misc_feature 1..356: note = synthetic sequence
  source 1..356: mol_type = other DNA
ctctcccccgaccaggggcggttctgaaggacttcaccgtgtccggcaacctactgtttatgtcagttcgggaccaggacagggaaggcgctgggcggatgagggtggtgggttgggggctgggatccgcctccccggaggggcagaaagctagagatctcagaacacccaaacacaaggtctcagaacagagacctggtacaccaggcccgccgccacccgagggagcccagggagatgggtgcagaggtgtcgcctttaatgtgatgttctctgcccctcacatttagccgactgactgctgcagaccaccgccaactgcagctctccatcagctcctgtctccagcagctttc

SEQ ID NO: 365 - DNA, 105 bp, synthetic construct
  misc_feature 1..105: note = synthetic sequence
  source 1..105: mol_type = other DNA
gctgactgcagggcctgctccctgccccccacctccaggttggggccttcaccatggatcagttccctgaatcagtgacagaaaactttgagtacgatgatttgg

SEQ ID NO: 366 - DNA, 107 bp, synthetic construct
  misc_feature 1..107: note = synthetic sequence
  source 1..107: mol_type = other DNA
gtggctgactggcagatccagaggttcccttggcagtccacgccaggccttcaccatggatcagttccctgaatcagtgacagaaaactttgagtacgatgatttgg

SEQ ID NO: 367 - DNA, 130 bp, synthetic construct
  misc_feature 1..130: note = synthetic sequence
  source 1..130: mol_type = other DNA
gcgtttaagttggcagacttggatttcaggaagagctctctggcttctgggtggagaatggccagtggggccttcaccatggatcagttccctgaatcagtgacagaaaactttgagtacgatgatttgg

SEQ ID NO: 368 - DNA, 85 bp, synthetic construct
  misc_feature 1..85: note = synthetic sequence
  source 1..85: mol_type = other DNA
ctcggaacaccacagcgactagaggccttcaccatggatcagttccctgaatcagtgacagaaaactttgagtacgatgatttgg

SEQ ID NO: 369 - DNA, 116 bp, synthetic construct
  misc_feature 1..116: note = synthetic sequence
  source 1..116: mol_type = other DNA
acctattatcggcctagaccaagacgctacgtagagcctcctgaaatgattgggcctatgcggcccgagcagttcagtgatgaagtggaaccagcaacacctgaagaaggggaacc

SEQ ID NO: 370 - DNA, 116 bp, synthetic construct; identical to SEQ ID NO: 369
  misc_feature 1..116: note = synthetic sequence
  source 1..116: mol_type = other DNA

SEQ ID NO: 371 - DNA, 116 bp, synthetic construct; identical to SEQ ID NO: 369
  misc_feature 1..116: note = synthetic sequence
  source 1..116: mol_type = other DNA

SEQ ID NO: 372 - DNA, 116 bp, synthetic construct; identical to SEQ ID NO: 369
  misc_feature 1..116: note = synthetic sequence
  source 1..116: mol_type = other DNA

SEQ ID NO: 373 - DNA, 116 bp, synthetic construct; identical to SEQ ID NO: 369
  misc_feature 1..116: note = synthetic sequence
  source 1..116: mol_type = other DNA

SEQ ID NO: 374 - DNA, 112 bp, synthetic construct
  misc_feature 1..112: note = synthetic sequence
  source 1..112: mol_type = other DNA
gacatgtcccaagtttcagggaaggaaagcccccctgtaagcgatactccagatgagggcgatgagcccatgccgatccccgaggacctctccaccacctcgggaggacagc

SEQ ID NO: 375 - DNA, 87 bp, synthetic construct
  misc_feature 1..87: note = synthetic sequence
  source 1..87: mol_type = other DNA
ctcagattactacaaccgatccacctcaccttggaatctccaccgcaatgaggaccctgagagatatccctctgtgatctgggaggc

SEQ ID NO: 376 - DNA, 85 bp, synthetic construct
  misc_feature 1..85: note = synthetic sequence
  source 1..85: mol_type = other DNA
cttaatcagcaatatcaacgtaatagttctggaactaaagggatctgaaacaacattcatgtgtgaatatgctgatgagacagca

SEQ ID NO: 377 - DNA, 82 bp, synthetic construct
  misc_feature 1..82: note = synthetic sequence
  source 1..82: mol_type = other DNA
cttccacaaatgcagggagaagacagaaacacagactaacatgcccttcatgtgattcttatgagaaaaaaccacccaaaga

SEQ ID NO: 378 - DNA, 86 bp, synthetic construct
  misc_feature 1..86: note = synthetic sequence
  source 1..86: mol_type = other DNA
gacgttcgtctcattggggagaaactgttccacggagtcagtatgagtgagcgctgctatctgatgaagcaggtgctgaacttcac

SEQ ID NO: 379 - DNA, 722 bp, synthetic construct
  misc_feature 1..722: note = synthetic sequence
  source 1..722: mol_type = other DNA
ccatgtcgctcatggtcgtcagcatggcgtgtgttgggttcttcttgctgcagggggcctggccacatgagggagtccacagaaaaccttccctcctggcccacccaggtcccctggtgaaatcagaagagacagtcatcctgcaatgttggtcagatgtcaggtttgagcacttccttctgcacagagaggggaagtataaggacactttgcacctcattggagagcaccatgatggggtctccaaggccaacttctccatcggtcccatgatgcaagaccttgcagggacctacagatgctacggttctgttactcactccccctatcagttgtcagctcccagtgaccctctggacatcgtcatcacaggtctatatgagaaaccttctctctcagcccagccgggccccacggttttggcaggagagagcgtgaccttgtcctgcagctcccggagctcctatgacatgtaccatctatccagggagggggaggcccatgaacgtaggttctctgcagggcccaaggtcaacggaacattccaggccgactttcctctgggccctgccacccacggaggaacctacagatgcttcggctctttccgtgactctccctatgagtggtcaaactcgagtgacccactgcttgtttctgtcacaggaaacccttcaaatagttggccttcacccactgaaccaagctccaaaaccggtaac

SEQ ID NO: 380 - DNA, 103 bp, synthetic construct
  misc_feature 1..103: note = synthetic sequence
  source 1..103: mol_type = other DNA
ctatgagtggtcaaactcgagtgacccactgcttgtttctgtcacaggaaacccttcaaatagttggccttcacccactgaaccaagctccaaaaccggtaac

SEQ ID NO: 381 - DNA, 79 bp, synthetic construct
  misc_feature 1..79: note = synthetic sequence
  source 1..79: mol_type = other DNA
tgggacaccacagagcagcactgaaggagaagacctgcctgtgggtccccatcgcccaagtcctgcccacactcccacc

SEQ ID NO: 382 - DNA, 113 bp, synthetic construct
  misc_feature 1..113: note = synthetic sequence
  source 1..113: mol_type = other DNA
tccgagctcacccagcagctggcgcaggccaccggcaagcccccccagtacatcgcggtgcacgtggtcccggaccagctcatggccttcggcggctccagcgagccgtgcgc

SEQ ID NO: 383 - DNA, 133 bp, synthetic construct
  misc_feature 1..133: note = synthetic sequence
  source 1..133: mol_type = other DNA
tcacttctcgctcgacacagccagagctggaggtgggtgcccggcacggaggggcctgcggaccaatggctctgccctgcaccttagggctcgggatgctgctggccctgccaggggccttgggctcgggtgg

SEQ ID NO: 384 - DNA, 116 bp, synthetic construct
  misc_feature 1..116: note = synthetic sequence
  source 1..116: mol_type = other DNA
ctcggagaaaatcttctatgtgtatatgaagagaaagtatgaggctatgactaaactaggtttcaaggccaccctcccacctttcatgtgtaataaacgggccgaagacttccagg

SEQ ID NO: 385 - DNA, 122 bp, synthetic construct
  misc_feature 1..122: note = synthetic sequence
  source 1..122: mol_type = other DNA
ctctctacgaacatttcaacagcccacatcccacccctgcacctgcggacatcagccagaagcaagttcacaggcctctgcagacccctgacctctctggcttctactccctgacctcaggc

SEQ ID NO: 386 - DNA, 78 bp, synthetic construct
  misc_feature 1..78: note = synthetic sequence
  source 1..78: mol_type = other DNA
agataatacctaaagaggaacactgtaaaatgccagaagcaggtgaagagcaaccacaagtttaaatgaagacaagct

SEQ ID NO: 387 - DNA, 102 bp, synthetic construct; identical to SEQ ID NO: 297
  misc_feature 1..102: note = synthetic sequence
  source 1..102: mol_type = other DNA

SEQ ID NO: 388 - DNA, 127 bp, synthetic construct
  misc_feature 1..127: note = synthetic sequence
  source 1..127: mol_type = other DNA
caccaaagcagaggggcaggcagcacaccacccagcagccagagcaccagcccagccatggtccttgaggtgagtgaccaccaagtgctaaatgacgccgaggttgccgccctcctggagaacttca

SEQ ID NO: 389 - DNA, 105 bp, synthetic construct
  misc_feature 1..105: note = synthetic sequence
  source 1..105: mol_type = other DNA
ccattgctcaggcatgggaaagcatcgctacacatcagcaggaatatctgtcactgtgaaagagctatttccagctccagtgctgaatgcatctgtgacatcccc

SEQ ID NO: 390 - DNA, 102 bp, synthetic construct
  misc_feature 1..102: note = synthetic sequence
  source 1..102: mol_type = other DNA
agcggctcctacttctgcagggggcttgttgggagtaaaaatgtgtcttcagagactgtgaacatcaccatcactcaaggtttggcagtgtcaaccatctca

SEQ ID NO: 391 - DNA, 104 bp, synthetic construct
  misc_feature 1..104: note = synthetic sequence
  source 1..104: mol_type = other DNA
ctggaaacagtactagcaaaggccagacgtcttactcaacaacttccctgccaccacctccaccatcccatccggccagccaaccaccattgccagcatctcac

SEQ ID NO: 392 - DNA, 104 bp, synthetic construct
  misc_feature 1..104: note = synthetic sequence
  source 1..104: mol_type = other DNA
gcagcacgaggggctgcaagagcccctcaccctgagctgggagccatcttcccagcccaccatccccatcatgggcatcgttgctggcctggctgtcctggttg

SEQ ID NO: 393 - DNA, 97 bp, synthetic construct
  misc_feature 1..97: note = synthetic sequence
  source 1..97: mol_type = other DNA
aggaaggtgcatcaccatctacaggagaagaagaatggacttgctaaatgacctagcactattctctggcctgatttatcatatcccttttctcctc

SEQ ID NO: 394 - DNA, 100 bp, synthetic construct
  misc_feature 1..100: note = synthetic sequence
  source 1..100: mol_type = other DNA
gtgtggagaccatcaaggaagacatgaatgtcaagtttttcaatagcaacaaaaagaaacgagatgacttcgaaaagctgactaattattcggtaactga

SEQ ID NO: 395 - DNA, 133 bp, synthetic construct
  misc_feature 1..133: note = synthetic sequence
  source 1..133: mol_type = other DNA
cgcggctgcctgtctgctccggcagcaccatgtcgctcttggtcgtcagcatggcgtgtgttgggttcttcttgctgcagggggcctggccacatgagggagtccacagaaaaccttccctcctggcccaccc

SEQ ID NO: 396 - DNA, 102 bp, synthetic construct
  misc_feature 1..102: note = synthetic sequence
  source 1..102: mol_type = other DNA
aacttcatgaagatgttctttgatgcggagctgtcccagatgcagacgcatgtctctgacacctcagtggtcctctccatggacaacaaccgcaacctggac

SEQ ID NO: 397 - DNA, 108 bp, synthetic construct; identical to SEQ ID NO: 87
  misc_feature 1..108: note = synthetic sequence
  source 1..108: mol_type = other DNA

SEQ ID NO: 398 - DNA, 107 bp, synthetic construct
  misc_feature 1..107: note = synthetic sequence
  source 1..107: mol_type = other DNA
ctcccgagtgattgtcatgacaacgaaagaagtggagagaggaaagagtaaatgtgtcaaatactggcctgatgagtatgctctaaaagaatatggcgtcatgcgtg

SEQ ID NO: 399 - DNA, 22 bp, synthetic construct
  misc_feature 1..22: note = synthetic sequence
  source 1..22: mol_type = other DNA
  modified_base 8: mod_base = OTHER; note = uracil
  modified_base 21: mod_base = OTHER; note = uracil
ttccatgtcgaagaaccgagtc

SEQ ID NO: 400 - DNA, 20 bp, synthetic construct
  misc_feature 1..20: note = synthetic sequence
  source 1..20: mol_type = other DNA
  modified_base 6: mod_base = OTHER; note = uracil
  modified_base 19: mod_base = OTHER; note = uracil
gcagctaccaccagcacatt

SEQ ID NO: 401 - DNA, 21 bp, synthetic construct
  misc_feature 1..21: note = synthetic sequence
  source 1..21: mol_type = other DNA
  modified_base 6: mod_base = OTHER; note = uracil
  modified_base 17: mod_base = OTHER; note = uracil
cgtcatgaagggtccttccaa

SEQ ID NO: 402 - DNA, 21 bp, synthetic construct
  misc_feature 1..21: note = synthetic sequence
  source 1..21: mol_type = other DNA
  modified_base 10: mod_base = OTHER; note = uracil
  modified_base 19: mod_base = OTHER; note = uracil
atggctgtctgatggcattga

SEQ ID NO: 403 - DNA, 21 bp, synthetic construct
  misc_feature 1..21: note = synthetic sequence
  source 1..21: mol_type = other DNA
  modified_base 11: mod_base = OTHER; note = uracil
caatcctgcatcccccatagt

SEQ ID NO: 404 - DNA, 26 bp, synthetic construct
  misc_feature 1..26: note = synthetic sequence
  source 1..26: mol_type = other DNA
  modified_base 14: mod_base = OTHER; note = uracil
  modified_base 25: mod_base = OTHER; note = uracil
tgtctctctttcctcttctgttccta

SEQ ID NO: 405 - DNA, 26 bp, synthetic construct
  misc_feature 1..26: note = synthetic sequence
  source 1..26: mol_type = other DNA
  modified_base 2: mod_base = OTHER; note = uracil
  modified_base 15: mod_base = OTHER; note = uracil
gtgaacagaaaacttggaacgaaagt

SEQ ID NO: 406 - DNA, 20 bp, synthetic construct
  misc_feature 1..20: note = synthetic sequence
  source 1..20: mol_type = other DNA
  modified_base 9: mod_base = OTHER; note = uracil
  modified_base 18: mod_base = OTHER; note = uracil
cggtgtgctcctcactgtaa

SEQ ID NO: 407 - DNA, 21 bp, synthetic construct
  misc_feature 1..21: note = synthetic sequence
  source 1..21: mol_type = other DNA
  modified_base 4: mod_base = OTHER; note = uracil
  modified_base 8: mod_base = OTHER; note = uracil
ccatgactcaaggcacagact

SEQ ID NO: 408 - DNA, 21 bp, synthetic construct
  misc_feature 1..21: note = synthetic sequence
  source 1..21: mol_type = other DNA
  modified_base 9: mod_base = OTHER; note = uracil
  modified_base 15: mod_base = OTHER; note = uracil
tccccacatcactgtcgaaac

SEQ ID NO: 409 - DNA, 26 bp, synthetic construct
  misc_feature 1..26: note = synthetic sequence
  source 1..26: mol_type = other DNA
  modified_base 9: mod_base = OTHER; note = uracil
  modified_base 24: mod_base = OTHER; note = uracil
tctcaacataagacagtgaccagtct

SEQ ID NO: 410 - DNA, 22 bp, synthetic construct
  misc_feature 1..22: note = synthetic sequence
  source 1..22: mol_type = other DNA
  modified_base 11: mod_base = OTHER; note = uracil
  modified_base 19: mod_base = OTHER; note = uracil
accagggaggtgtcgttatagt

SEQ ID NO: 411 - DNA, 19 bp, synthetic construct
  misc_feature 1..19: note = synthetic sequence
  source 1..19: mol_type = other DNA
  modified_base 9: mod_base = OTHER; note = uracil
  modified_base 18: mod_base = OTHER; note = uracil
ctggccagtacacctgtca

SEQ ID NO: 412 - DNA, 23 bp, synthetic construct
  misc_feature 1..23: note = synthetic sequence
  source 1..23: mol_type = other DNA
  modified_base 9: mod_base = OTHER; note = uracil
tcttggcctcgcatcttagaaag

SEQ ID NO: 413 - DNA, 19 bp, synthetic construct
  misc_feature 1..19: note = synthetic sequence
  source 1..19: mol_type = other DNA
  modified_base 12: mod_base = OTHER; note = uracil
  modified_base 16: mod_base = OTHER; note = uracil
gcaaacccggctacttgga

SEQ ID NO: 414 - DNA, 22 bp, synthetic construct
  misc_feature 1..22: note = synthetic sequence
  source 1..22: mol_type = other DNA
  modified_base 12: mod_base = OTHER; note = uracil
  modified_base 21: mod_base = OTHER; note = uracil
catcatacacctccacgctgtt

SEQ ID NO: 415 - DNA, 26 bp, synthetic construct
  misc_feature 1..26: note = synthetic sequence
  source 1..26: mol_type = other DNA
  modified_base 11: mod_base = OTHER; note = uracil
  modified_base 24: mod_base = OTHER; note = uracil
tgtggaattatcacccatcatcatcc

SEQ ID NO: 416 - DNA, 24 bp, synthetic construct
  misc_feature 1..24: note = synthetic sequence
  source 1..24: mol_type = other DNA
  modified_base 9: mod_base = OTHER; note = uracil
  modified_base 23: mod_base = OTHER; note = uracil
acaagatctcccaagtcctccata

SEQ ID NO: 417 - DNA, 20 bp, synthetic construct
  misc_feature 1..20: note = synthetic sequence
  source 1..20: mol_type = other DNA
  modified_base 3: mod_base = OTHER; note = uracil
tgttcctgcatcagcaccaa

SEQ ID NO: 418 - DNA, 28 bp, synthetic construct
  misc_feature 1..28: note = synthetic sequence
  source 1..28: mol_type = other DNA
  modified_base 13: mod_base = OTHER; note = uracil
  modified_base 25: mod_base = OTHER; note = uracil
gctgaatctgggtttagacatgtttgaa

SEQ ID NO: 419 - DNA, 19 bp, synthetic construct
  misc_feature 1..19: note = synthetic sequence
  source 1..19: mol_type = other DNA
  modified_base 7: mod_base = OTHER; note = uracil
  modified_base 16: mod_base = OTHER; note = uracil
cagccctggaatccctgat

SEQ ID NO: 420 - DNA, 20 bp, synthetic construct
  misc_feature 1..20: note = synthetic sequence
  source 1..20: mol_type = other DNA
  modified_base 14: mod_base = OTHER; note = uracil
  modified_base 19: mod_base = OTHER; note = uracil
aaactgggccacctcgattt

SEQ ID NO: 421 - DNA, 28 bp, synthetic construct
  misc_feature 1..28: note = synthetic sequence
  source 1..28: mol_type = other DNA
  modified_base 9: mod_base = OTHER; note = uracil
  modified_base 21: mod_base = OTHER; note = uracil
gaaatggataaactcatcgctcagaaag

SEQ ID NO: 422 - DNA, 20 bp, synthetic construct
  misc_feature 1..20: note = synthetic sequence
  source 1..20: mol_type = other DNA
  modified_base 8: mod_base = OTHER; note = uracil
  modified_base 18: mod_base = OTHER; note = uracil
ccgcccatcatcagaagtga

SEQ ID NO: 423 - DNA, 26 bp, synthetic construct
  misc_feature 1..26: note = synthetic sequence
  source 1..26: mol_type = other DNA
  modified_base 11: mod_base = OTHER; note = uracil
  modified_base 25: mod_base = OTHER; note = uracil
cagcttgagttaaacgaacgtacttg

SEQ ID NO: 424 - DNA, 19 bp, synthetic construct
  misc_feature 1..19: note = synthetic sequence
  source 1..19: mol_type = other DNA
  modified_base 9: mod_base = OTHER; note = uracil
  modified_base 18: mod_base = OTHER; note = uracil
cggcagcgtggtttctgta

SEQ ID NO: 425 - DNA, 20 bp, synthetic construct
  misc_feature 1..20: note = synthetic sequence
  source 1..20: mol_type = other DNA
  modified_base 8: mod_base = OTHER; note = uracil
  modified_base 12: mod_base = OTHER; note = uracil
ctgagcatccctcccaacat

SEQ ID NO: 426 - DNA, 21 bp, synthetic construct
  misc_feature 1..21: note = synthetic sequence
  source 1..21: mol_type = other DNA
  modified_base 11: mod_base = OTHER; note = uracil
  modified_base 17: mod_base = OTHER; note = uracil
ttgttccagctgtccctgaag

SEQ ID NO: 427 - DNA, 20 bp, synthetic construct
  misc_feature 1..20: note = synthetic sequence
  source 1..20: mol_type = other DNA
  modified_base 7: mod_base = OTHER; note = uracil
  modified_base 12: mod_base = OTHER; note = uracil
ggcccatcagttcacacagg

SEQ ID NO: 428 - DNA, 21 bp, synthetic construct
  misc_feature 1..21: note = synthetic sequence
  source 1..21: mol_type = other DNA
  modified_base 10: mod_base = OTHER; note = uracil
  modified_base 19: mod_base = OTHER; note = uracil
ctgcagtcctttctccagtct

SEQ ID NO: 429 - DNA, 19 bp, synthetic construct
  misc_feature 1..19: note = synthetic sequence
  source 1..19: mol_type = other DNA
  modified_base 2: mod_base = OTHER; note = uracil
  modified_base 10: mod_base = OTHER; note = uracil
ctagagtgctcgcagcagt

SEQ ID NO: 430 - DNA, 21 bp, synthetic construct
  misc_feature 1..21: note = synthetic sequence
  source 1..21: mol_type = other DNA
  modified_base 14: mod_base = OTHER; note = uracil
  modified_base 20: mod_base = OTHER; note = uracil
actggcagcaggatgagtttc

SEQ ID NO: 431 - DNA, 27 bp, synthetic construct
  misc_feature 1..27: note = synthetic sequence
  source 1..27: mol_type = other DNA
  modified_base 13: mod_base = OTHER; note = uracil
  modified_base 23: mod_base = OTHER; note = uracil
gtctaccacaagtactccctgataaag

SEQ ID NO: 432 - DNA, 28 bp, synthetic construct
  misc_feature 1..28: note = synthetic sequence
  source 1..28: mol_type = other DNA
  modified_base 12: mod_base = OTHER; note = uracil
  modified_base 27: mod_base = OTHER; note = uracil
accatcagtgttgatatccaactctttg

SEQ ID NO: 433 - DNA, 22 bp, synthetic construct
  misc_feature 1..22: note = synthetic sequence
  source 1..22: mol_type = other DNA
  modified_base 8: mod_base = OTHER; note = uracil
  modified_base 21: mod_base = OTHER; note = uracil
gcttctctgaaaggctctcctt

SEQ ID NO: 434 - DNA, 19 bp, synthetic construct
  misc_feature 1..19: note = synthetic sequence
  source 1..19: mol_type = other DNA
  modified_base 4: mod_base = OTHER; note = uracil
  modified_base 10: mod_base = OTHER; note = uracil
aaatacggctgcaccgagt

SEQ ID NO: 435 - DNA, 20 bp, synthetic construct
  misc_feature 1..20: note = synthetic sequence
  source 1..20: mol_type = other DNA
  modified_base 11: mod_base = OTHER; note = uracil
  modified_base 19: mod_base = OTHER; note = uracil
ccaggctacatgcaggactt

SEQ ID NO: 436 - DNA, 21 bp, synthetic construct
  misc_feature 1..21: note = synthetic sequence
  source 1..21: mol_type = other DNA
  modified_base 11: mod_base = OTHER; note = uracil
  modified_base 20: mod_base = OTHER; note = uracil
gggtgacacctggaagttgta

SEQ ID NO: 437 - DNA, 20 bp, synthetic construct
  misc_feature 1..20: note = synthetic sequence
  source 1..20: mol_type = other DNA
  modified_base 10: mod_base = OTHER; note = uracil
  modified_base 19: mod_base = OTHER; note = uracil
tggttgtcctcgtcctcctt

SEQ ID NO: 438 - DNA, 24 bp, synthetic construct
  misc_feature 1..24: note = synthetic sequence
  source 1..24: mol_type = other DNA
  modified_base 10: mod_base = OTHER; note = uracil
  modified_base 23: mod_base = OTHER; note = uracil
agtctgaggtccagtagaagtgtt

SEQ ID NO: 439 - DNA, 22 bp, synthetic construct
  misc_feature 1..22: note = synthetic sequence
  source 1..22: mol_type = other DNA
  modified_base 9: mod_base = OTHER; note = uracil
  modified_base 18: mod_base = OTHER; note = uracil
tggaggtgtcctacaggtgaaa

SEQ ID NO: 440 - DNA, 21 bp, synthetic construct
  misc_feature 1..21: note = synthetic sequence
  source 1..21: mol_type = other DNA
  modified_base 8: mod_base = OTHER; note = uracil
  modified_base 20: mod_base = OTHER; note = uracil
ggcagggtagagctgtaactg

SEQ ID NO: 441 - DNA, 21 bp, synthetic construct
  misc_feature 1..21: note = synthetic sequence
  source 1..21: mol_type = other DNA
  modified_base 12: mod_base = OTHER; note = uracil
  modified_base 20: mod_base = OTHER; note = uracil
tgcagaacggctgcctaattt

SEQ ID NO: 442 - DNA, 28 bp, synthetic construct
  misc_feature 1..28: note = synthetic sequence
  source 1..28: mol_type = other DNA
  modified_base 13: mod_base = OTHER; note = uracil
  modified_base 27: mod_base = OTHER; note = uracil
caagactctgttttctaaatcaggcatt

SEQ ID NO: 443 - DNA, 26 bp, synthetic construct
  misc_feature 1..26: note = synthetic sequence
  source 1..26: mol_type = other DNA
  modified_base 15: mod_base = OTHER; note = uracil
  modified_base 19: mod_base = OTHER; note = uracil
gcagaagaggaagatttctgaagagt

SEQ ID NO: 444 - DNA, 24 bp, synthetic construct
  misc_feature 1..24: note = synthetic sequence
  source 1..24: mol_type = other DNA
  modified_base 13: mod_base = OTHER; note = uracil
  modified_base 23: mod_base = OTHER; note = uracil
tcaagttccaggtgaaatggcatt

SEQ ID NO: 445 - DNA, 20 bp, synthetic construct
  misc_feature 1..20: note = synthetic sequence
  source 1..20: mol_type = other DNA
  modified_base 10: mod_base = OTHER; note = uracil
  modified_base 19: mod_base = OTHER; note = uracil
cagacagcctagctggactt

SEQ ID NO: 446 - DNA, 22 bp, synthetic construct
  misc_feature 1..22: note = synthetic sequence
  source 1..22: mol_type = other DNA
  modified_base 10: mod_base = OTHER; note = uracil
  modified_base 21: mod_base = OTHER; note = uracil
cgtgaaggatggcagcaaagta

SEQ ID NO: 447 - DNA, 21 bp, synthetic construct
  misc_feature 1..21: note = synthetic sequence
  source 1..21: mol_type = other DNA
  modified_base 7: mod_base = OTHER; note = uracil
  modified_base 19: mod_base = OTHER; note = uracil
ctcccatccccagaagggtat

SEQ ID NO: 448 - DNA, 22 bp, synthetic construct
  misc_feature 1..22: note = synthetic sequence
  source 1..22: mol_type = other DNA
  modified_base 7: mod_base = OTHER; note = uracil
  modified_base 20: mod_base = OTHER; note = uracil
tctgtctgccaggattctctca

SEQ ID NO: 449 - DNA, 19 bp, synthetic construct
  misc_feature 1..19: note = synthetic sequence
  source 1..19: mol_type = other DNA
  modified_base 7: mod_base = OTHER; note = uracil
  modified_base 9: mod_base = OTHER; note = uracil
accgagtgtcccagacaga

SEQ ID NO: 450 - DNA, 27 bp, synthetic construct
  misc_feature 1..27: note = synthetic sequence
  source 1..27: mol_type = other DNA
  modified_base 13: mod_base = OTHER; note = uracil
  modified_base 24: mod_base = OTHER; note = uracil
tcaactggatactgcagaggtattaca

SEQ ID NO: 451 - DNA, 20 bp, synthetic construct
  misc_feature 1..20: note = synthetic sequence
  source 1..20: mol_type = other DNA
  modified_base 7: mod_base = OTHER; note = uracil
  modified_base 18: mod_base = OTHER; note = uracil
gtccactgacaggctgttgt

SEQ ID NO: 452 - DNA, 19 bp, synthetic construct
  misc_feature 1..19: note = synthetic sequence
  source 1..19: mol_type = other DNA
  modified_base 11: mod_base = OTHER; note = uracil
  modified_base 18: mod_base = OTHER; note = uracil
atcgttgccctcgcatctt

SEQ ID NO: 453 - DNA, 23 bp, synthetic construct
  misc_feature 1..23: note = synthetic sequence
  source 1..23: mol_type = other DNA
  modified_base 8: mod_base = OTHER; note = uracil
  modified_base 17: mod_base = OTHER; note = uracil
gactttgtgtggacactgagaga

SEQ ID NO: 454 - DNA, 25 bp, synthetic construct
  misc_feature 1..25: note = synthetic sequence
  source 1..25: mol_type = other DNA
  modified_base 11: mod_base = OTHER; note = uracil
  modified_base 20: mod_base = OTHER; note = uracil
atacagagtctgggcaggttaaaag

SEQ ID NO: 455 - DNA, 20 bp, synthetic construct
  misc_feature 1..20: note = synthetic sequence
  source 1..20: mol_type = other DNA
  modified_base 10: mod_base = OTHER; note = uracil
  modified_base 19: mod_base = OTHER; note = uracil
gcgcaagggtttctggtttg

SEQ ID NO: 456 - DNA, 22 bp, synthetic construct
  misc_feature 1..22: note = synthetic sequence
  source 1..22: mol_type = other DNA
  modified_base 10: mod_base = OTHER; note = uracil
  modified_base 21: mod_base = OTHER; note = uracil
ccagtgccataaggcatcattg

SEQ ID NO: 457 - DNA, 23 bp, synthetic construct
  misc_feature 1..23: note = synthetic sequence
  source 1..23: mol_type = other DNA
  modified_base 13: mod_base = OTHER; note = uracil
  modified_base 21: mod_base = OTHER; note = uracil
gctggacagagctacagacctat

SEQ ID NO: 458 - DNA, 19 bp, synthetic construct
  misc_feature 1..19: note = synthetic sequence
  source 1..19: mol_type = other DNA
  modified_base 6: mod_base = OTHER; note = uracil
  modified_base 17: mod_base = OTHER; note = uracil
gccgctgcactttttctgg

SEQ ID NO: 459 - DNA, 20 bp, synthetic construct
  misc_feature 1..20: note = synthetic sequence
  source 1..20: mol_type = other DNA
  modified_base 8: mod_base = OTHER; note = uracil
  modified_base 16: mod_base = OTHER; note = uracil
ctcagcttagccaggtggaa

SEQ ID NO: 460 - DNA, 22 bp, synthetic construct
  misc_feature 1..22: note = synthetic sequence
  source 1..22: mol_type = other DNA
  modified_base 12: mod_base = OTHER; note = uracil
  modified_base 20: mod_base = OTHER; note = uracil
gagatgacaagttccggagtga

SEQ ID NO: 461 - DNA, 21 bp, synthetic construct
  misc_feature 1..21: note = synthetic sequence
  source 1..21: mol_type = other DNA
  modified_base 14: mod_base = OTHER; note = uracil
  modified_base 19: mod_base = OTHER; note = uracil
acgtgcagcaagatgacatca

SEQ ID NO: 462 - DNA, 21 bp, synthetic construct
  misc_feature 1..21: note = synthetic sequence
  source 1..21: mol_type = other DNA
  modified_base 13: mod_base = OTHER; note = uracil
  modified_base 20: mod_base = OTHER; note = uracil
gtccttgacccattgctcctt

SEQ ID NO: 463 - DNA, 21 bp, synthetic construct
  misc_feature 1..21: note = synthetic sequence
  source 1..21: mol_type = other DNA
  modified_base 6: mod_base = OTHER; note = uracil
  modified_base 17: mod_base = OTHER; note = uracil
agggttcaccttggcatcaat

SEQ ID NO: 464 - DNA, 22 bp, synthetic construct
  misc_feature 1..22: note = synthetic sequence
  source 1..22: mol_type = other DNA
  modified_base 6: mod_base = OTHER; note = uracil
  modified_base 15: mod_base = OTHER; note = uracil
tgctctgttgaatgtccacact

SEQ ID NO: 465 - DNA, 29 bp, synthetic construct
  misc_feature 1..29: note = synthetic sequence
  source 1..29: mol_type = other DNA
  modified_base 9: mod_base = OTHER; note = uracil
  modified_base 23: mod_base = OTHER; note = uracil
cggtatcctcgaattcaaagtatcaaagt

SEQ ID NO: 466 - DNA, 28 bp, synthetic construct
  misc_feature 1..28: note = synthetic sequence
  source 1..28: mol_type = other DNA
  modified_base 10: mod_base = OTHER; note = uracil
  modified_base 26: mod_base = OTHER; note = uracil
gagatgagataaaacccatcacagttga

SEQ ID NO: 467 - DNA, 25 bp, synthetic construct
  misc_feature 1..25: note = synthetic sequence
  source 1..25: mol_type = other DNA
  modified_base 13: mod_base = OTHER; note = uracil
  modified_base 24: mod_base = OTHER; note = uracil
cctgagatcacctaaaaagctgcta

SEQ ID NO: 468 - DNA, 20 bp, synthetic construct
  misc_feature 1..20: note = synthetic sequence
  source 1..20: mol_type = other DNA
  modified_base 10: mod_base = OTHER; note = uracil
  modified_base 19: mod_base = OTHER; note = uracil
tggtttggctggtgtcgttt

SEQ ID NO: 469 - DNA, 26 bp, synthetic construct
  misc_feature 1..26: note = synthetic sequence
  source 1..26: mol_type = other DNA
  modified_base 11: mod_base = OTHER; note = uracil
  modified_base 25: mod_base = OTHER; note = uracil
gtctgtgtggtttgaagcagaatttt

SEQ ID NO: 470 - DNA, 20 bp, synthetic construct
  misc_feature 1..20: note = synthetic sequence
  source 1..20: mol_type = other DNA
  modified_base 10: mod_base = OTHER; note = uracil
  modified_base 19: mod_base = OTHER; note = uracil
gacagggtctggctacagtt

SEQ ID NO: 471 - DNA, 22 bp, synthetic construct
  misc_feature 1..22: note = synthetic sequence
  source 1..22: mol_type = other DNA
  modified_base 12: mod_base = OTHER; note = uracil
  modified_base 21: mod_base = OTHER; note = uracil
accacacggactgagactgatt

SEQ ID NO: 472 - DNA, 19 bp, synthetic construct
  misc_feature 1..19: note = synthetic sequence
  source 1..19: mol_type = other DNA
  modified_base 6: mod_base = OTHER; note = uracil
  modified_base 18: mod_base = OTHER; note = uracil
gtccgtaggagcccatgtg

SEQ ID NO: 473 - DNA, 21 bp, synthetic construct
  misc_feature 1..21: note = synthetic sequence
  source 1..21: mol_type = other DNA
  modified_base 7: mod_base = OTHER; note = uracil
  modified_base 17: mod_base = OTHER; note = uracil
tgtgcctggaccatagtcaga

SEQ ID NO: 474 - DNA, 22 bp, synthetic construct
  misc_feature 1..22: note = synthetic sequence
  source 1..22: mol_type = other DNA
  modified_base 8: mod_base = OTHER; note = uracil
  modified_base 17: mod_base = OTHER; note = uracil
aacagcatctgctggttgaaga

SEQ ID NO: 475 - DNA, 21 bp, synthetic construct
  misc_feature 1..21: note = synthetic sequence
  source 1..21: mol_type = other DNA
  modified_base 13: mod_base = OTHER; note = uracil
  modified_base 20: mod_base = OTHER; note = uracil
ggccagaagagctgagacatc

SEQ ID NO: 476 - DNA, 19 bp, synthetic construct
  misc_feature 1..19: note = synthetic sequence
  source 1..19: mol_type = other DNA
  modified_base 9: mod_base = OTHER; note = uracil
  modified_base 15: mod_base = OTHER; note = uracil
ggctgcgatttgcttcaca

SEQ ID NO: 477 - DNA, 23 bp, synthetic construct
  misc_feature 1..23: note = synthetic sequence
  source 1..23: mol_type = other DNA
  modified_base 11: mod_base = OTHER; note = uracil
  modified_base 21: mod_base = OTHER; note = uracil
agtggaaagatgaactgcgatgt

SEQ ID NO: 478 - DNA, 23 bp, synthetic construct
  misc_feature 1..23: note = synthetic sequence
  source 1..23: mol_type = other DNA
  modified_base 11: mod_base = OTHER; note = uracil
  modified_base 21: mod_base = OTHER; note = uracil
agtggaaagatgaactgcgatgt

SEQ ID NO: 479 - DNA, 19 bp, synthetic construct
  misc_feature 1..19: note = synthetic sequence
  source 1..19: mol_type = other DNA
  modified_base 13: mod_base = OTHER; note = uracil
  modified_base 18: mod_base = OTHER; note = uracil
tggcggaggaggttacctt

SEQ ID NO: 480 - DNA, 20 bp, synthetic construct
  misc_feature 1..20: note = synthetic sequence
  source 1..20: mol_type = other DNA
  modified_base 9: mod_base = OTHER; note = uracil
  modified_base 16: mod_base = OTHER; note = uracil
cgatgggctcagctttcaga

SEQ ID NO: 481 - DNA, 21 bp, synthetic construct
  misc_feature 1..21: note = synthetic sequence
  source 1..21: mol_type = other DNA
  modified_base 9: mod_base = OTHER; note = uracil
  modified_base 12: mod_base = OTHER; note = uracil
acaaaacctcgtccacggaat

SEQ ID NO: 482 - DNA, 21 bp, synthetic construct
  misc_feature 1..21: note = synthetic sequence
  source 1..21: mol_type = other DNA
  modified_base 5: mod_base = OTHER; note = uracil
  modified_base 13: mod_base = OTHER; note = uracil
cagatgaggaggtccagcaaa

SEQ ID NO: 483 - DNA, 20 bp, synthetic construct
  misc_feature 1..20: note = synthetic sequence
  source 1..20: mol_type = other DNA
  modified_base 7: mod_base = OTHER; note = uracil
  modified_base 18: mod_base = OTHER; note = uracil
tgctcctcgggtgatactga

SEQ ID NO: 484 - DNA, 20 bp, synthetic construct
  misc_feature 1..20: note = synthetic sequence
  source 1..20: mol_type = other DNA
  modified_base 2: mod_base = OTHER; note = uracil
  modified_base 17: mod_base = OTHER; note = uracil
ctgaaagccagggagttggt

SEQ ID NO: 485 - DNA, 24 bp, synthetic construct
  misc_feature 1..24: note = synthetic sequence
  source 1..24: mol_type = other DNA
  modified_base 2: mod_base = OTHER; note = uracil
  modified_base 13: mod_base = OTHER; note = uracil
cttgtttcactctcacacccagat

SEQ ID NO: 486 - DNA, 23 bp, synthetic construct
  misc_feature 1..23: note = synthetic sequence
  source 1..23: mol_type = other DNA
  modified_base 8: mod_base = OTHER; note = uracil
  modified_base 21: mod_base = OTHER; note = uracil
tgtgctgtcaaccctaagtttgt

SEQ ID NO: 487 - DNA, 20 bp, synthetic construct
  misc_feature 1..20: note = synthetic sequence
  source 1..20: mol_type = other DNA
  modified_base 8: mod_base = OTHER; note = uracil
  modified_base 12: mod_base = OTHER; note = uracil
caggcgatgtctagcacagg

SEQ ID NO: 488 - DNA, 20 bp, synthetic construct
  misc_feature 1..20: note = synthetic sequence
  source 1..20: mol_type = other DNA
  modified_base 4: mod_base = OTHER; note = uracil
  modified_base 18: mod_base = OTHER; note = uracil
ggatgcgccaggaagtttca

SEQ ID NO: 489 - DNA, 18 bp, synthetic construct
  misc_feature 1..18: note = synthetic sequence
  source 1..18: mol_type = other DNA
  modified_base 8: mod_base = OTHER; note = uracil
  modified_base 17: mod_base = OTHER; note = uracil
ctctggctctccgtcgtt

SEQ ID NO: 490 - DNA, 21 bp, synthetic construct
  misc_feature 1..21: note = synthetic sequence
  source 1..21: mol_type = other DNA
  modified_base 10: mod_base = OTHER; note = uracil
  modified_base 19: mod_base = OTHER; note = uracil
gtgggaagatggctccattct

SEQ ID NO: 491 - DNA, 22 bp, synthetic construct
  misc_feature 1..22: note = synthetic sequence
  source 1..22: mol_type = other DNA
  modified_base 7: mod_base = OTHER; note = uracil
  modified_base 16: mod_base = OTHER; note = uracil
acacagtcctttgcatgcagat

SEQ ID NO: 492 - DNA, 24 bp, synthetic construct
  misc_feature 1..24: note = synthetic sequence
  source 1..24: mol_type = other DNA
  modified_base 8: mod_base = OTHER; note = uracil
  modified_base 18: mod_base = OTHER; note = uracil
tcatctctggaacaaactggcaaa

SEQ ID NO: 493 - DNA, 21 bp, synthetic construct
  misc_feature 1..21: note = synthetic sequence
  source 1..21: mol_type = other DNA
  modified_base 11: mod_base = OTHER; note = uracil
  modified_base 20: mod_base = OTHER; note = uracil
cttgctgaactgcaggaagtc

SEQ ID NO: 494 - DNA, 23 bp, synthetic construct
  misc_feature 1..23: note = synthetic sequence
  source 1..23: mol_type = other DNA
  modified_base 5: mod_base = OTHER; note = uracil
  modified_base 14: mod_base = OTHER; note = uracil
agcgtgcagataatgacaaggaa

SEQ ID NO: 495 - DNA, 22 bp, synthetic construct
  misc_feature 1..22: note = synthetic sequence
  source 1..22: mol_type = other DNA
  modified_base 12: mod_base = OTHER; note = uracil
  modified_base 20: mod_base = OTHER; note = uracil
gatttgacggctcctctactgt

SEQ ID NO: 496 - DNA, 20 bp, synthetic construct
  misc_feature 1..20: note = synthetic sequence
  source 1..20: mol_type = other DNA
  modified_base 3: mod_base = OTHER; note = uracil
  modified_base 18: mod_base = OTHER; note = uracil
cctggaacaggcagctgtat

SEQ ID NO: 497 - DNA, 24 bp, synthetic construct
  misc_feature 1..24: note = synthetic sequence
  source 1..24: mol_type = other DNA
  modified_base 12: mod_base = OTHER; note = uracil
  modified_base 22: mod_base = OTHER; note = uracil
ttccagggaagttcaaggcaatag

SEQ ID NO: 498 - DNA, 23 bp, synthetic construct
  misc_feature 1..23: note = synthetic sequence
  source 1..23: mol_type = other DNA
  modified_base 11: mod_base = OTHER; note = uracil
  modified_base 20: mod_base = OTHER; note = uracil
actactccagtccctccaatgac

SEQ ID NO: 499 - DNA, 21 bp, synthetic construct
  misc_feature 1..21: note = synthetic sequence
  source 1..21: mol_type = other DNA
  modified_base 9: mod_base = OTHER; note = uracil
  modified_base 17: mod_base = OTHER; note = uracil
gccgacactcgtagtatccat

SEQ ID NO: 500 - DNA, 23 bp, synthetic construct
  misc_feature 1..23: note = synthetic sequence
  source 1..23: mol_type = other DNA
  modified_base 12: mod_base = OTHER; note = uracil
  modified_base 22: mod_base = OTHER; note = uracil
aagtggatgattgcagtgaggtt

SEQ ID NO: 501 - DNA, 27 bp, synthetic construct
  misc_feature 1..27: note = synthetic sequence
  source 1..27: mol_type = other DNA
  modified_base 7: mod_base = OTHER; note = uracil
  modified_base 19: mod_base = OTHER; note = uracil
caaatctgaagcatagtttccaaccat

SEQ ID NO: 502 - DNA, 19 bp, synthetic construct
  misc_feature 1..19: note = synthetic sequence
  source 1..19: mol_type = other DNA
  modified_base 9: mod_base = OTHER; note = uracil
  modified_base 18: mod_base = OTHER; note = uracil
tgaccctctgcagctccta

SEQ ID NO: 503 - DNA, 21 bp, synthetic construct
  misc_feature 1..21: note = synthetic sequence
  source 1..21: mol_type = other DNA
  modified_base 9: mod_base = OTHER; note = uracil
  modified_base 18: mod_base = OTHER; note = uracil
gacagtgatgaaggcgatgga

SEQ ID NO: 504 - DNA, 19 bp, synthetic construct
  misc_feature 1..19: note = synthetic sequence
  source 1..19: mol_type = other DNA
  modified_base 3: mod_base = OTHER; note = uracil
  modified_base 12: mod_base = OTHER; note = uracil
cgtcatcgtcatccccgat

SEQ ID NO: 505 - DNA, 26 bp, synthetic construct
  misc_feature 1..26: note = synthetic sequence
  source 1..26: mol_type = other DNA
  modified_base 16: mod_base = OTHER; note = uracil
  modified_base 25: mod_base = OTHER; note = uracil
cagccacaaagagggtatattggtta

SEQ ID NO: 506 - DNA, 26 bp, synthetic construct
  misc_feature 1..26: note = synthetic sequence
  source 1..26: mol_type = other DNA
  modified_base 13: mod_base = OTHER; note = uracil
gatcttacacatttgttccatggctt

SEQ ID NO: 507 - DNA, 19 bp, synthetic construct
  misc_feature 1..19: note = synthetic sequence
  source 1..19: mol_type = other DNA
  modified_base 10: mod_base = OTHER; note = uracil
  modified_base 15: mod_base = OTHER; note = uracil
gatgtcccatggcgtaggt

SEQ ID NO: 508 - DNA, 22 bp, synthetic construct
  misc_feature 1..22: note = synthetic sequence
  source 1..22: mol_type = other DNA
  modified_base 10: mod_base = OTHER; note = uracil
  modified_base 16: mod_base = OTHER; note = uracil
cttggaccattctcatgccaac

SEQ ID NO: 509 - DNA, 23 bp, synthetic construct
  misc_feature 1..23: note = synthetic sequence
  source 1..23: mol_type = other DNA
  modified_base 6: mod_base = OTHER; note = uracil
  modified_base 15: mod_base = OTHER; note = uracil
gcacatcctatgggtaaccagaa

SEQ ID NO: 510 - DNA, 24 bp, synthetic construct
  misc_feature 1..24: note = synthetic sequence
  source 1..24: mol_type = other DNA
  modified_base 11: mod_base = OTHER; note = uracil
  modified_base 23: mod_base = OTHER; note = uracil
agagccaacatttgcttcaagttc

SEQ ID NO: 511 - DNA, 20 bp, synthetic construct
  misc_feature 1..20: note = synthetic sequence
  source 1..20: mol_type = other DNA
  modified_base 7: mod_base = OTHER; note = uracil
  modified_base 18: mod_base = OTHER; note = uracil
ggaagctgagctggtgatgt

SEQ ID NO: 512 - DNA, 20 bp, synthetic construct
  misc_feature 1..20: note = synthetic sequence
  source 1..20: mol_type = other DNA
  modified_base 5: mod_base = OTHER; note = uracil
  modified_base 8: mod_base = OTHER; note = uracil
tgcatgttccaggagcacaa

SEQ ID NO: 513 - DNA, 22 bp, synthetic construct
  misc_feature 1..22: note = synthetic sequence
  source 1..22: mol_type = other DNA
  modified_base 11: mod_base = OTHER; note = uracil
  modified_base 20: mod_base = OTHER; note = uracil
cttctccttctgccacttctca

SEQ ID NO: 514 - DNA, 22 bp, synthetic construct
  misc_feature 1..22: note = synthetic sequence
  source 1..22: mol_type = other DNA
  modified_base 10: mod_base = OTHER; note = uracil
  modified_base 20: mod_base = OTHER; note = uracil
atgaggaacttgaggcaagtca

SEQ ID NO: 515 - DNA, 23 bp, synthetic construct
  misc_feature 1..23: note = synthetic sequence
  source 1..23: mol_type = other DNA
  modified_base 12: mod_base = OTHER; note = uracil
  modified_base 22: mod_base = OTHER; note = uracil
ccaggcccccgtagatacatata

SEQ ID NO: 516 - DNA, 21 bp, synthetic construct
  misc_feature 1..21: note = synthetic sequence
  source 1..21: mol_type = other DNA
  modified_base 7: mod_base = OTHER; note = uracil
  modified_base 14: mod_base = OTHER; note = uracil
cggcgctcatgagtaagaaca

SEQ ID NO: 517 - DNA, 24 bp, synthetic construct
  misc_feature 1..24: note = synthetic sequence
  source 1..24: mol_type = other DNA
  modified_base 9: mod_base = OTHER; note = uracil
  modified_base 21: mod_base = OTHER; note = uracil
cggacacttgaacttcttcctgat

SEQ ID NO: 518 - DNA, 22 bp, synthetic construct
  misc_feature 1..22: note = synthetic sequence
  source 1..22: mol_type = other DNA
  modified_base 2: mod_base = OTHER; note = uracil
  modified_base 12: mod_base = OTHER; note = uracil
ctggttgtgagtcaccaaggaa

SEQ ID NO: 519 - DNA, 20 bp, synthetic construct
  misc_feature 1..20: note = synthetic sequence
  source 1..20: mol_type = other DNA
  modified_base 6: mod_base = OTHER; note = uracil
  modified_base 10: mod_base = OTHER; note = uracil
tgcaattgctccagccagaa

SEQ ID NO: 520 - DNA, 21 bp, synthetic construct
  misc_feature 1..21: note = synthetic sequence
  source 1..21: mol_type = other DNA
  modified_base 5: mod_base = OTHER; note = uracil
  modified_base 17: mod_base = OTHER; note = uracil
acagtcacagccattgtagca

SEQ ID NO: 521 - DNA, 26 bp, synthetic construct
  misc_feature 1..26: note = synthetic sequence
  source 1..26: mol_type = other DNA
  modified_base 12: mod_base = OTHER; note = uracil
  modified_base 23: mod_base = OTHER; note = uracil
ggaaattgaagtggaaggcttgtaaa

SEQ ID NO: 522 - DNA, 20 bp, synthetic construct
  misc_feature 1..20: note = synthetic sequence
  source 1..20: mol_type = other DNA
  modified_base 7: mod_base = OTHER; note = uracil
  modified_base 19: mod_base = OTHER; note = uracil
tgagcctggaattgcagctt

SEQ ID NO: 523 - DNA, 22 bp, synthetic construct
  misc_feature 1..22: note = synthetic sequence
  source 1..22: mol_type = other DNA
  modified_base 11: mod_base = OTHER; note = uracil
  modified_base 21: mod_base = OTHER; note = uracil
tggctgttattgctccaaggtt

SEQ ID NO: 524 - DNA, 21 bp, synthetic construct
  misc_feature 1..21: note = synthetic sequence
  source 1..21: mol_type = other DNA
  modified_base 11: mod_base = OTHER; note = uracil
  modified_base 20: mod_base = OTHER; note = uracil
ctctgttcgctcaggtccttt

SEQ ID NO: 525 - DNA, 19 bp, synthetic construct
  misc_feature 1..19: note = synthetic sequence
  source 1..19: mol_type = other DNA
  modified_base 7: mod_base = OTHER; note = uracil
  modified_base 12: mod_base = OTHER; note = uracil
gcctccttccgtaccacat

SEQ ID NO: 526 - DNA, 20 bp, synthetic construct
  misc_feature 1..20: note = synthetic sequence
  source 1..20: mol_type = other DNA
  modified_base 8: mod_base = OTHER; note = uracil
  modified_base 19: mod_base = OTHER; note = uracil
tcccaagtgcaacctctgtc

SEQ ID NO: 527 - DNA, 23 bp, synthetic construct
  misc_feature 1..23: note = synthetic sequence
  source 1..23: mol_type = other DNA
  modified_base 12: mod_base = OTHER; note = uracil
  modified_base 19: mod_base = OTHER; note = uracil
ggtgcagaagctcttgtatcact

SEQ ID NO: 528 - DNA, 27 bp, synthetic construct
  misc_feature 1..27: note = synthetic sequence
  source 1..27: mol_type = other DNA
  modified_base 12: mod_base = OTHER; note = uracil
  modified_base 26: mod_base = OTHER; note = uracil
cactatgggactgagtaacattctctt

SEQ ID NO: 529 - DNA, 21 bp, synthetic construct
  misc_feature 1..21: note = synthetic sequence
  source 1..21: mol_type = other DNA
  modified_base 10: mod_base = OTHER; note = uracil
  modified_base 18: mod_base = OTHER; note = uracil
ctagctcactcaggctttggt

SEQ ID NO: 530 - DNA, 20 bp, synthetic construct
  misc_feature 1..20: note = synthetic sequence
  source 1..20: mol_type = other DNA
  modified_base 8: mod_base = OTHER; note = uracil
  modified_base 15: mod_base = OTHER; note = uracil
ctactgctgccggatccaaa

SEQ ID NO: 531 - DNA, 19 bp, synthetic construct
  misc_feature 1..19: note = synthetic sequence
  source 1..19: mol_type = other DNA
  modified_base 8: mod_base = OTHER; note = uracil
tgtcccctggtggtaagca

SEQ ID NO: 532 - DNA, 22 bp, synthetic construct
  misc_feature 1..22: note = synthetic sequence
  source 1..22: mol_type = other DNA
  modified_base 9: mod_base = OTHER; note = uracil
  modified_base 18: mod_base = OTHER; note = uracil
ggcctttgttcagtttctgcaa

SEQ ID NO: 533 - DNA, 22 bp, synthetic construct
  misc_feature 1..22: note = synthetic sequence
  source 1..22: mol_type = other DNA
  modified_base 10: mod_base = OTHER; note = uracil
  modified_base 20: mod_base = OTHER; note = uracil
gtccgctcctgttccttgatat

SEQ ID NO: 534 - DNA, 22 bp, synthetic construct
  misc_feature 1..22: note = synthetic sequence
  source 1..22: mol_type = other DNA
  modified_base 8: mod_base = OTHER; note = uracil
  modified_base 19: mod_base = OTHER; note = uracil
cccctattcctgtaacggtcaa

SEQ ID NO: 535 - DNA, 21 bp, synthetic construct
  misc_feature 1..21: note = synthetic sequence
  source 1..21: mol_type = other DNA
  modified_base 10: mod_base = OTHER; note = uracil
  modified_base 18: mod_base = OTHER; note = uracil
gcatacccctgctgaactgag

SEQ ID NO: 536 - DNA, 22 bp, synthetic construct
  misc_feature 1..22: note = synthetic sequence
  source 1..22: mol_type = other DNA
  modified_base 11: mod_base = OTHER; note = uracil
  modified_base 21: mod_base = OTHER; note = uracil
cggaagacagtggcatctactt

SEQ ID NO: 537 - DNA, 21 bp, synthetic construct
  misc_feature 1..21: note = synthetic sequence
  source 1..21: mol_type = other DNA
  modified_base 14: mod_base = OTHER; note = uracil
  modified_base 19: mod_base = OTHER; note = uracil
gtaaccggcacactctcttct

SEQ ID NO: 538 - DNA, 23 bp, synthetic construct
  misc_feature 1..23: note = synthetic sequence
  source 1..23: mol_type = other DNA
  modified_base 10: mod_base = OTHER; note = uracil
  modified_base 18: mod_base = OTHER; note = uracil
gtggatgactgagtacctgaacc

SEQ ID NO: 539 - DNA, 21 bp, synthetic construct
  misc_feature 1..21: note = synthetic sequence
  source 1..21: mol_type = other DNA
  modified_base 9: mod_base = OTHER; note = uracil
  modified_base 20: mod_base = OTHER; note = uracil
ggccaaactgagcagagtctt

SEQ ID NO: 540 - DNA, 18 bp, synthetic construct
  misc_feature 1..18: note = synthetic sequence
  source 1..18: mol_type = other DNA
  modified_base 5: mod_base = OTHER; note = uracil
  modified_base 8: mod_base = OTHER; note = uracil
cgaatggtacccgagcct

SEQ ID NO: 541 - DNA, 22 bp, synthetic construct
  misc_feature 1..22: note = synthetic sequence
  source 1..22: mol_type = other DNA
  modified_base 9: mod_base = OTHER; note = uracil
  modified_base 21: mod_base = OTHER; note = uracil
gctgccagttcacaatcatctg

SEQ ID NO: 542 - DNA, 19 bp, synthetic construct
  misc_feature 1..19: note = synthetic sequence
  source 1..19: mol_type = other DNA
  modified_base 8: mod_base = OTHER; note = uracil
  modified_base 18: mod_base = OTHER; note = uracil
gcgtgtctctggacagcta

SEQ ID NO: 543 - DNA, 20 bp, synthetic construct
  misc_feature 1..20: note = synthetic sequence
  source 1..20: mol_type = other DNA
  modified_base 10: mod_base = OTHER; note = uracil
  modified_base 17: mod_base = OTHER; note = uracil
gggtccaactgcatcctgaa

SEQ ID NO: 544 - DNA, 25 bp, synthetic construct
  misc_feature 1..25: note = synthetic sequence
  source 1..25: mol_type = other DNA
  modified_base 9: mod_base = OTHER; note = uracil
  modified_base 24: mod_base = OTHER; note = uracil
ccagactatgacagctcttggaata

SEQ ID NO: 545 - DNA, 24 bp, synthetic construct
  misc_feature 1..24: note = synthetic sequence
  source 1..24: mol_type = other DNA
  modified_base 12: mod_base = OTHER; note = uracil
  modified_base 20: mod_base = OTHER; note = uracil
cttggatgaccttcttcagtcgat

SEQ ID NO: 546 - DNA, 23 bp, synthetic construct
  misc_feature 1..23: note = synthetic sequence
  source 1..23: mol_type = other DNA
  modified_base 13: mod_base = OTHER; note = uracil
  modified_base 17: mod_base = OTHER; note = uracil
gaaccgaagacgtgtttgcaaat

SEQ ID NO: 547 - DNA, 21 bp, synthetic construct
  misc_feature 1..21: note = synthetic sequence
  source 1..21: mol_type = other DNA
  modified_base 9: mod_base = OTHER; note = uracil
  modified_base 17: mod_base = OTHER; note = uracil
ggaaggacttgctccctcaaa

SEQ ID NO: 548 - DNA, 26 bp, synthetic construct
  misc_feature 1..26: note = synthetic sequence
  source 1..26: mol_type = other DNA
  modified_base 12: mod_base = OTHER; note = uracil
  modified_base 25: mod_base = OTHER; note = uracil
ggaagatggattcatacctgctgatg

SEQ ID NO: 549 - DNA, 26 bp, synthetic construct
  misc_feature 1..26: note = synthetic sequence
  source 1..26: mol_type = other DNA
  modified_base 13: mod_base = OTHER; note = uracil
  modified_base 24: mod_base = OTHER; note = uracil
agttcaacatggttccttccttgtag

SEQ ID NO: 550 - DNA, 22 bp, synthetic construct
  misc_feature 1..22: note = synthetic sequence
  source 1..22: mol_type = other DNA
  modified_base 7: mod_base = OTHER; note = uracil
  modified_base 16: mod_base = OTHER; note = uracil
tggcggtcttcagaatcaacat

SEQ ID NO: 551 - DNA, 27 bp, synthetic construct
  misc_feature 1..27: note = synthetic sequence
  source 1..27: mol_type = other DNA
  modified_base 12: mod_base = OTHER; note = uracil
  modified_base 24: mod_base = OTHER; note = uracil
gcttctgacggtatgtattaagttcct

SEQ ID NO: 552 - DNA, 20 bp, synthetic construct
  misc_feature 1..20: note = synthetic sequence
  source 1..20: mol_type = other DNA
  modified_base 15: mod_base = OTHER; note = uracil
  modified_base 18: mod_base = OTHER; note = uracil
cacgcagggagaagtgatcc

SEQ ID NO: 553 - DNA, 21 bp, synthetic construct
  misc_feature 1..21: note = synthetic sequence
  source 1..21: mol_type = other DNA
  modified_base 9: mod_base = OTHER; note = uracil
  modified_base 20: mod_base = OTHER; note = uracil
gcagcgtttccagaggtgata

SEQ ID NO: 554 - DNA, 21 bp, synthetic construct
  misc_feature 1..21: note = synthetic sequence
  source 1..21: mol_type = other DNA
  modified_base 8: mod_base = OTHER; note = uracil
  modified_base 18: mod_base = OTHER; note = uracil
gtcggagtacgggaacatcac

SEQ ID NO: 555 - DNA, 19 bp, synthetic construct
  misc_feature 1..19: note = synthetic sequence
  source 1..19: mol_type = other DNA
  modified_base 10: mod_base = OTHER; note = uracil
  modified_base 17: mod_base = OTHER; note = uracil
gctgaccgctgcttcttca

SEQ ID NO: 556 - DNA, 22 bp, synthetic construct
  misc_feature 1..22: note = synthetic sequence
  source 1..22: mol_type = other DNA
  modified_base 11: mod_base = OTHER; note = uracil
  modified_base 19: mod_base = OTHER; note = uracil
agagctaccatgtcctcttgga

SEQ ID NO: 557 - DNA, 20 bp, synthetic construct
  misc_feature 1..20: note = synthetic sequence
  source 1..20: mol_type = other DNA
  modified_base 10: mod_base = OTHER; note = uracil
  modified_base 19: mod_base = OTHER; note = uracil
cggaacacctggcagtcttt

SEQ ID NO: 558 - DNA, 20 bp, synthetic construct
  misc_feature 1..20: note = synthetic sequence
  source 1..20: mol_type = other DNA
  modified_base 9: mod_base = OTHER; note = uracil
  modified_base 18: mod_base = OTHER; note = uracil
ctgggtctttggcctgttca

SEQ ID NO: 559 - DNA, 19 bp, synthetic construct
  misc_feature 1..19: note = synthetic sequence
  source 1..19: mol_type = other DNA
  modified_base 8: mod_base = OTHER; note = uracil
  modified_base 17: mod_base = OTHER; note = uracil
ggcccacttccggtattct

SEQ ID NO: 560 - DNA, 21 bp, synthetic construct
  misc_feature 1..21: note = synthetic sequence
  source 1..21: mol_type = other DNA
  modified_base 13: mod_base = OTHER; note = uracil
  modified_base 15: mod_base = OTHER; note = uracil
accaagcaagactgtgagacc

SEQ ID NO: 561 - DNA, 27 bp, synthetic construct
  misc_feature 1..27: note = synthetic sequence
  source 1..27: mol_type = other DNA
  modified_base 12: mod_base = OTHER; note = uracil
  modified_base 25: mod_base = OTHER; note = uracil
gtgtttctctctgaagattcggtatgt

SEQ ID NO: 562 - DNA, 20 bp, synthetic construct
  misc_feature 1..20: note = synthetic sequence
  source 1..20: mol_type = other DNA
  modified_base 8: mod_base = OTHER; note = uracil
  modified_base 18: mod_base = OTHER; note = uracil
gctgggcttcacggacatag

SEQ ID NO: 563 - DNA, 23 bp, synthetic construct
  misc_feature 1..23: note = synthetic sequence
  source 1..23: mol_type = other DNA
  modified_base 12: mod_base = OTHER; note = uracil
  modified_base 21: mod_base = OTHER; note = uracil
ttttcccaatgtagccagtgtca

SEQ ID NO: 564 - DNA, 20 bp, synthetic construct
  misc_feature 1..20: note = synthetic sequence
  source 1..20: mol_type = other DNA
  modified_base 7: mod_base = OTHER; note = uracil
  modified_base 18: mod_base = OTHER; note = uracil
gcgccctgaagacagaatgt

SEQ ID NO: 565 - DNA, 22 bp, synthetic construct
  misc_feature 1..22: note = synthetic sequence
  source 1..22: mol_type = other DNA
  modified_base 11: mod_base = OTHER; note = uracil
  modified_base 21: mod_base = OTHER; note = uracil
cctgttggtctatgcgtctgta

SEQ ID NO: 566 - DNA, 22 bp, synthetic construct
  misc_feature 1..22: note = synthetic sequence
  source 1..22: mol_type = other DNA
  modified_base 9: mod_base = OTHER; note = uracil
  modified_base 18: mod_base = OTHER; note = uracil
cttctctgtcacctggctcaat

SEQ ID NO: 567 - DNA, 19 bp, synthetic construct
  misc_feature 1..19: note = synthetic sequence
  source 1..19: mol_type = other DNA
  modified_base 5: mod_base = OTHER; note = uracil
  modified_base 16: mod_base = OTHER; note = uracil
gcgatgagccagcaatcag

SEQ ID NO: 568 - DNA, 22 bp, synthetic construct
  misc_feature 1..22: note = synthetic sequence
  source 1..22: mol_type = other DNA
  modified_base 12: mod_base = OTHER; note = uracil
  modified_base 20: mod_base = OTHER; note = uracil
ctacgtgaagatccgccattct

SEQ ID NO: 569 - DNA, 19 bp, synthetic construct
  misc_feature 1..19: note = synthetic sequence
  source 1..19: mol_type = other DNA
  modified_base 10: mod_base = OTHER; note = uracil
  modified_base 18: mod_base = OTHER; note = uracil
tggtcccagtcccacagtt

SEQ ID NO: 570 - DNA, 21 bp, synthetic construct
  misc_feature 1..21: note = synthetic sequence
  source 1..21: mol_type = other DNA
  modified_base 4: mod_base = OTHER; note = uracil
  modified_base 11: mod_base = OTHER; note = uracil
ccatctgcattggacccaaca

SEQ ID NO: 571 - DNA, 22 bp, synthetic construct
  misc_feature 1..22: note = synthetic sequence
  source 1..22: mol_type = other DNA
gcactggaatgttctccccaaa

SEQ ID NO: 572 - DNA, 24 bp, synthetic construct
  misc_feature 1..24: note = synthetic sequence
  source 1..24: mol_type = other DNA
  modified_base 12: mod_base = OTHER; note = uracil
  modified_base 23: mod_base = OTHER; note = uracil
tgaactctccctatgtgtggtctt

SEQ ID NO: 573 - DNA, 21 bp, synthetic construct
  misc_feature 1..21: note = synthetic sequence
  source 1..21: mol_type = other DNA
  modified_base 7: mod_base = OTHER; note = uracil
  modified_base 19: mod_base = OTHER; note = uracil
ccgacatcagagacacactgg

SEQ ID NO: 574 - DNA, 22 bp, synthetic construct
  misc_feature 1..22: note = synthetic sequence
  source 1..22: mol_type = other DNA
  modified_base 9: mod_base = OTHER; note = uracil
  modified_base 21: mod_base = OTHER; note = uracil
tgtggacatcacctgctacttc

SEQ ID NO: 575 - DNA, 20 bp, synthetic construct
  misc_feature 1..20: note = synthetic sequence
  source 1..20: mol_type = other DNA
  modified_base 10: mod_base = OTHER; note = uracil
  modified_base 19: mod_base = OTHER; note = uracil
atgggctccttggactcatc

SEQ ID NO: 576 - DNA, 20 bp, synthetic construct
  misc_feature 1..20: note = synthetic sequence
  source 1..20: mol_type = other DNA
  modified_base 6: mod_base = OTHER; note = uracil
  modified_base 19: mod_base = OTHER; note = uracil
gtcgctgaccgtgaacgata

SEQ ID NO: 577 - DNA, 22 bp, synthetic construct
  misc_feature 1..22: note = synthetic sequence
  source 1..22: mol_type = other DNA
  modified_base 6: mod_base = OTHER; note = uracil
  modified_base 20: mod_base = OTHER; note = uracil
atggctccaagcaatggaatct

SEQ ID NO: 578 - DNA, 19 bp, synthetic construct
  misc_feature 1..19: note = synthetic sequence
  source 1..19: mol_type = other DNA
  modified_base 8: mod_base = OTHER; note = uracil
  modified_base 12: mod_base = OTHER; note = uracil
tgccgcctcactcagaaag

SEQ ID NO: 579 - DNA, 20 bp, synthetic construct
  misc_feature 1..20: note = synthetic sequence
  source 1..20: mol_type = other DNA
  modified_base 3: mod_base = OTHER; note = uracil
  modified_base 18: mod_base = OTHER; note = uracil
actgaagcgacaaggtgtgt

SEQ ID NO: 580 - DNA, 22 bp, synthetic construct
  misc_feature 1..22: note = synthetic sequence
  source 1..22: mol_type = other DNA
  modified_base 11: mod_base = OTHER; note = uracil
  modified_base 21: mod_base = OTHER; note = uracil
catctggttctccctggttctt

SEQ ID NO: 581 - DNA, 24 bp, synthetic construct
  misc_feature 1..24: note = synthetic sequence
  source 1..24: mol_type = other DNA
  modified_base 2: mod_base = OTHER; note = uracil
  modified_base 19: mod_base = OTHER; note = uracil
ctgagggaaaggacaagatgaagt

SEQ ID NO: 582 - DNA, 26 bp, synthetic construct
  misc_feature 1..26: note = synthetic sequence
  source 1..26: mol_type = other DNA
  modified_base 13: mod_base = OTHER; note = uracil
  modified_base 23: mod_base = OTHER; note = uracil
tgacaccatagatgaagaggattcca

SEQ ID NO: 583 - DNA, 21 bp, synthetic construct
  misc_feature 1..21: note = synthetic sequence
  source 1..21: mol_type = other DNA
  modified_base 11: mod_base = OTHER; note = uracil
  modified_base 20: mod_base = OTHER; note = uracil
caacaacacctcggaggtcta

SEQ ID NO: 584 - DNA, 23 bp, synthetic construct
  misc_feature 1..23: note = synthetic sequence
  source 1..23: mol_type = other DNA
  modified_base 8: mod_base = OTHER; note = uracil
  modified_base 20: mod_base = OTHER; note = uracil
ggcacgatgatgaagaggatgat

SEQ ID NO: 585 - DNA, 24 bp, synthetic construct
  misc_feature 1..24: note = synthetic sequence
  source 1..24: mol_type = other DNA
  modified_base 12: mod_base = OTHER; note = uracil
  modified_base 23: mod_base = OTHER; note = uracil
caattgattgatgctcaccagctt

SEQ ID NO: 586 - DNA, 20 bp, synthetic construct
  misc_feature 1..20: note = synthetic sequence
  source 1..20: mol_type = other DNA
  modified_base 3: mod_base = OTHER; note = uracil
  modified_base 12: mod_base = OTHER; note = uracil
cctctccttcctgccagaca

SEQ ID NO: 587 - DNA, 19 bp, synthetic construct
  misc_feature 1..19: note = synthetic sequence
  source 1..19: mol_type = other DNA
  modified_base 12: mod_base = OTHER; note = uracil
  modified_base 15: mod_base = OTHER; note = uracil
gcacaagcagctgatccga

SEQ ID NO: 588 - DNA, 26 bp, synthetic construct
  misc_feature 1..26: note = synthetic sequence
  source 1..26: mol_type = other DNA
  modified_base 12: mod_base = OTHER; note = uracil
  modified_base 25: mod_base = OTHER; note = uracil
ctctctcatgatcgtctttagccttt

SEQ ID NO: 589 - DNA, 20 bp, synthetic construct
  misc_feature 1..20: note = synthetic sequence
  source 1..20: mol_type = other DNA
  modified_base 13: mod_base = OTHER; note = uracil
  modified_base 19: mod_base = OTHER; note = uracil
actgagaccgagtcgcctta

SEQ ID NO: 590 - DNA, 20 bp, synthetic construct
  misc_feature 1..20: note = synthetic sequence
  source 1..20: mol_type = other DNA
  modified_base 5: mod_base = OTHER; note = uracil
  modified_base 16: mod_base = OTHER; note = uracil
ggcttcaggaatggctggat

SEQ ID NO: 591 - DNA, 19 bp, synthetic construct
  misc_feature 1..19: note = synthetic sequence
  source 1..19: mol_type = other DNA
  modified_base 10: mod_base = OTHER; note = uracil
  modified_base 18: mod_base = OTHER; note = uracil
gacattgcctgccatgctt

SEQ ID NO: 592 - DNA, 24 bp, synthetic construct
  misc_feature 1..24: note = synthetic sequence
  source 1..24: mol_type = other DNA
  modified_base 9: mod_base = OTHER; note = uracil
  modified_base 22: mod_base = OTHER; note = uracil
tctcctgctaagatggagtgttca

SEQ ID NO: 593 - DNA, 20 bp, synthetic construct
  misc_feature 1..20: note = synthetic sequence
  source 1..20: mol_type = other DNA
  modified_base 13: mod_base = OTHER; note = uracil
  modified_base 19: mod_base = OTHER; note = uracil
ccatgagcgacgtggctatt

SEQ ID NO: 594 - DNA, 20 bp, synthetic construct
  misc_feature 1..20: note = synthetic sequence
  source 1..20: mol_type = other DNA
  modified_base 8: mod_base = OTHER; note = uracil
  modified_base 17: mod_base = OTHER; note = uracil
ctcacgttggtccacatcct

SEQ ID NO: 595 - DNA, 19 bp, synthetic construct
  misc_feature 1..19: note = synthetic sequence
  source 1..19: mol_type = other DNA
  modified_base 6: mod_base = OTHER; note = uracil
  modified_base 18: mod_base = OTHER; note = uracil
tgcattggaagccgtggtt

SEQ ID NO: 596 - DNA, 26 bp, synthetic construct
  misc_feature 1..26: note = synthetic sequence
  source 1..26: mol_type = other DNA
  modified_base 12: mod_base = OTHER; note = uracil
  modified_base 22: mod_base = OTHER; note = uracil
aaaagttcccgtggtattcagtaaca

SEQ ID NO: 597 - DNA, 24 bp, synthetic construct
  misc_feature 1..24: note = synthetic sequence
  source 1..24: mol_type = other DNA
  modified_base 13: mod_base = OTHER; note = uracil
  modified_base 23: mod_base = OTHER; note = uracil
tggtggacaagatggatgatgatg

SEQ ID NO: 598 - DNA, 25 bp, synthetic construct
  misc_feature 1..25: note = synthetic sequence
  source 1..25: mol_type = other DNA
  modified_base 10: mod_base = OTHER; note = uracil
  modified_base 24: mod_base = OTHER; note = uracil
cctccgtgatgatgatcttcttctt

SEQ ID NO: 599 - DNA, 27 bp, synthetic construct
  misc_feature 1..27: note = synthetic sequence
  source 1..27: mol_type = other DNA
  modified_base 9: mod_base = OTHER; note = uracil
  modified_base 20: mod_base = OTHER; note = uracil
ccaacatctgcctttacattgacaaac

SEQ ID NO: 600 - DNA, 20 bp, synthetic construct
  misc_feature 1..20: note = synthetic sequence
  source 1..20: mol_type = other DNA
  modified_base 10: mod_base = OTHER; note = uracil
  modified_base 19: mod_base = OTHER; note = uracil
ggctcagactccggttcttt

SEQ ID NO: 601 - DNA, 21 bp, synthetic construct
  misc_feature 1..21: note = synthetic sequence
  source 1..21: mol_type = other DNA
  modified_base 8: mod_base = OTHER; note = uracil
  modified_base 15: mod_base = OTHER; note = uracil
cctgtcctgcgtgttgaaaga

SEQ ID NO: 602 - DNA, 22 bp, synthetic construct
  misc_feature 1..22: note = synthetic sequence
  source 1..22: mol_type = other DNA
  modified_base 7: mod_base = OTHER; note = uracil
  modified_base 21: mod_base = OTHER; note = uracil
gggaactgggcagactcaaatt

SEQ ID NO: 603 - DNA, 21 bp, synthetic construct
  misc_feature 1..21: note = synthetic sequence
  source 1..21: mol_type = other DNA
  modified_base 3: mod_base = OTHER; note = uracil
  modified_base 10: mod_base = OTHER; note = uracil
cgtctctgttcagccaaggag

SEQ ID NO: 604 - DNA, 25 bp, synthetic construct
  misc_feature 1..25: note = synthetic sequence
  source 1..25: mol_type = other DNA
  modified_base 12: mod_base = OTHER; note = uracil
  modified_base 24: mod_base = OTHER; note = uracil
tggtctatgtgttcgtatcgcattt

SEQ ID NO: 605 - DNA, 26 bp, synthetic construct
  misc_feature 1..26: note = synthetic sequence
  source 1..26: mol_type = other DNA
  modified_base 10: mod_base = OTHER; note = uracil
  modified_base 24: mod_base = OTHER; note = uracil
cccaaccgatatcatttctgatctgt

SEQ ID NO: 606 - DNA, 21 bp, synthetic construct
  misc_feature 1..21: note = synthetic sequence
  source 1..21: mol_type = other DNA
  modified_base 10: mod_base = OTHER; note = uracil
  modified_base 19: mod_base = OTHER; note = uracil
ttgggccagttttccttgtct

SEQ ID NO: 607 - DNA, 20 bp, synthetic construct
  misc_feature 1..20: note = synthetic sequence
  source 1..20: mol_type = other DNA
  modified_base 7: mod_base = OTHER; note = uracil
  modified_base 14: mod_base = OTHER; note = uracil
cccaactcccaagtggcaaa

SEQ ID NO: 608 - DNA, 22 bp, synthetic construct
  misc_feature 1..22: note = synthetic sequence
  source 1..22: mol_type = other DNA
  modified_base 3: mod_base = OTHER; note = uracil
  modified_base 12: mod_base = OTHER; note = uracil
tgtgatcaggttgcaaaggaca

SEQ ID NO: 609 - DNA, 21 bp, synthetic construct
  misc_feature 1..21: note = synthetic sequence
  source 1..21: mol_type = other DNA
  modified_base 8: mod_base = OTHER; note = uracil
  modified_base 20: mod_base = OTHER; note = uracil
gtaccgctgcatgatcagcta

SEQ ID NO: 610 - DNA, 19 bp, synthetic construct
  misc_feature 1..19: note = synthetic sequence
  source 1..19: mol_type = other DNA
  modified_base 8: mod_base = OTHER; note = uracil
  modified_base 14: mod_base = OTHER; note = uracil
gtagccctcagcctgacat

SEQ ID NO: 611 - DNA, 19 bp, synthetic construct
  misc_feature 1..19: note = synthetic sequence
  source 1..19: mol_type = other DNA
  modified_base 5: mod_base = OTHER; note = uracil
  modified_base 17: mod_base = OTHER; note = uracil
gcagtcgggcattccttca

SEQ ID NO: 612 - DNA, 22 bp, synthetic construct
  misc_feature 1..22: note = synthetic sequence
  source 1..22: mol_type = other DNA
  modified_base 7: mod_base = OTHER; note = uracil
  modified_base 19: mod_base = OTHER; note = uracil
gtgtagtcagacgagcactcat

SEQ ID NO: 613 - DNA, 21 bp, synthetic construct
  misc_feature 1..21: note = synthetic sequence
  source 1..21: mol_type = other DNA
  modified_base 8: mod_base = OTHER; note = uracil
  modified_base 17: mod_base = OTHER; note = uracil
ctgcagctggttatcctgaca

SEQ ID NO: 614 - DNA, 20 bp, synthetic construct
  misc_feature 1..20: note = synthetic sequence
  source 1..20: mol_type = other DNA
  modified_base 8: mod_base = OTHER; note = uracil
  modified_base 19: mod_base = OTHER; note = uracil
aaggtggtggcgatggattt

SEQ ID NO: 615 - DNA, 20 bp, synthetic construct
  misc_feature 1..20: note = synthetic sequence
  source 1..20: mol_type = other DNA
  modified_base 9: mod_base = OTHER; note = uracil
  modified_base 18: mod_base = OTHER; note = uracil
gcggaccatcttctggatga

SEQ ID NO: 616 - DNA, 20 bp, synthetic construct
  misc_feature 1..20: note = synthetic sequence
  source 1..20: mol_type = other DNA
  modified_base 9: mod_base = OTHER; note = uracil
  modified_base 19: mod_base = OTHER; note = uracil
agccttggtcagtgccattt

SEQ ID NO: 617 - DNA, 24 bp, synthetic construct
  misc_feature 1..24: note = synthetic sequence
  source 1..24: mol_type = other DNA
  modified_base 8: mod_base = OTHER; note = uracil
  modified_base 21: mod_base = OTHER; note = uracil
gaagatgtaccaggtggagttcaa

SEQ ID NO: 618 - DNA, 23 bp, synthetic construct
  misc_feature 1..23: note = synthetic sequence
  source 1..23: mol_type = other DNA
  modified_base 9: mod_base = OTHER; note = uracil
  modified_base 19: mod_base = OTHER; note = uracil
gatttttgtggcacagtctcact

SEQ ID NO: 619 - DNA, 22 bp, synthetic construct
  misc_feature 1..22: note = synthetic sequence
  source 1..22: mol_type = other DNA
  modified_base 5: mod_base = OTHER; note = uracil
  modified_base 11: mod_base = OTHER; note = uracil
agagtttgtatgccgcaagaca

SEQ ID NO: 620 - DNA, 22 bp, synthetic construct
  misc_feature 1..22: note = synthetic sequence
  source 1..22: mol_type = other DNA
  modified_base 8: mod_base = OTHER; note = uracil
  modified_base 20: mod_base = OTHER; note = uracil
ggcgagttggattttggactga

SEQ ID NO: 621 - DNA, 21 bp, synthetic construct
  misc_feature 1..21: note = synthetic sequence
  source 1..21: mol_type = other DNA
  modified_base 8: mod_base = OTHER; note = uracil
  modified_base 17: mod_base = OTHER; note = uracil
gtgtgcttgtggactctcaca

SEQ ID NO: 622 - DNA, 22 bp, synthetic construct
  misc_feature 1..22: note = synthetic sequence
  source 1..22: mol_type = other DNA
  modified_base 11: mod_base = OTHER; note = uracil
  modified_base 18: mod_base = OTHER; note = uracil
gccagcgagatgagaaatagca

SEQ ID NO: 623 - DNA, 26 bp, synthetic construct
  misc_feature 1..26: note = synthetic sequence
  source 1..26: mol_type = other DNA
  modified_base 12: mod_base = OTHER; note = uracil
  modified_base 24: mod_base = OTHER; note = uracil
aattgtcatagtggacatctgcatca

SEQ ID NO: 624 - DNA, 20 bp, synthetic construct
  misc_feature 1..20: note = synthetic sequence
  source 1..20: mol_type = other DNA
  modified_base 10: mod_base = OTHER; note = uracil
  modified_base 19: mod_base = OTHER; note = uracil
gtggtggcctctccttgttt

SEQ ID NO: 625 - DNA, 21 bp, synthetic construct
  misc_feature 1..21: note = synthetic sequence
  source 1..21: mol_type = other DNA
  modified_base 9: mod_base = OTHER; note = uracil
  modified_base 19: mod_base = OTHER; note = uracil
agtttcactgcctggtgttga

SEQ ID NO: 626 - DNA, 22 bp, synthetic construct
  misc_feature 1..22: note = synthetic sequence
  source 1..22: mol_type = other DNA
  modified_base 8: mod_base = OTHER; note = uracil
  modified_base 19: mod_base = OTHER; note = uracil
gtacacgtgaaggtgagctcat

SEQ ID NO: 627 - DNA, 26 bp, synthetic construct
  misc_feature 1..26: note = synthetic sequence
  source 1..26: mol_type = other DNA
  modified_base 10: mod_base = OTHER; note = uracil
  modified_base 19: mod_base = OTHER; note = uracil
ggactaacatgttcaatgtgggacaa

SEQ ID NO: 628 - DNA, 21 bp, synthetic construct
  misc_feature 1..21: note = synthetic sequence
  source 1..21: mol_type = other DNA
  modified_base 9: mod_base = OTHER; note = uracil
  modified_base 17: mod_base = OTHER; note = uracil
gagtggatttcccgtgtagca

SEQ ID NO: 629 - DNA, 29 bp, synthetic construct
  misc_feature 1..29: note = synthetic sequence
  source 1..29: mol_type = other DNA
  modified_base 12: mod_base = OTHER; note = uracil
  modified_base 27: mod_base = OTHER; note = uracil
catatccttactggagagatggtagctat

SEQ ID NO: 630 - DNA, 20 bp, synthetic construct
  misc_feature 1..20: note = synthetic sequence
  source 1..20: mol_type = other DNA
  modified_base 8: mod_base = OTHER; note = uracil
  modified_base 17: mod_base = OTHER; note = uracil
ggctgtctctagcacatggt

SEQ ID NO: 631 - DNA, 25 bp, synthetic construct
  misc_feature 1..25: note = synthetic sequence
  source 1..25: mol_type = other DNA
  modified_base 10: mod_base = OTHER; note = uracil
  modified_base 21: mod_base = OTHER; note = uracil
agagtgacttcaaatgacagtgcaa

SEQ ID NO: 632 - DNA, 19 bp, synthetic construct
  misc_feature 1..19: note = synthetic sequence
  source 1..19: mol_type = other DNA
  modified_base 10: mod_base = OTHER; note = uracil
  modified_base 18: mod_base = OTHER; note = uracil
tcaggaagctccgcagttc

SEQ ID NO: 633 - DNA, 21 bp, synthetic construct
  misc_feature 1..21: note = synthetic sequence
  source 1..21: mol_type = other DNA
  modified_base 5: mod_base = OTHER; note = uracil
  modified_base 12: mod_base = OTHER; note = uracil
cacctgcgtgatgaggagaaa

SEQ ID NO: 634 - DNA, 22 bp, synthetic construct
  misc_feature 1..22: note = synthetic sequence
  source 1..22: mol_type = other DNA
  modified_base 10: mod_base = OTHER; note = uracil
  modified_base 20: mod_base = OTHER; note = uracil
gtgggcttatccaccatcttct

SEQ ID NO: 635 - DNA, 20 bp, synthetic construct
  misc_feature 1..20: note = synthetic sequence
  source 1..20: mol_type = other DNA
  modified_base 6: mod_base = OTHER; note = uracil
  modified_base 12: mod_base = OTHER; note = uracil
ctccgtgcttctcagacagt

SEQ ID NO: 636 - DNA, 22 bp, synthetic construct
  misc_feature 1..22: note = synthetic sequence
  source 1..22: mol_type = other DNA
  modified_base 10: mod_base = OTHER; note = uracil
  modified_base 21: mod_base = OTHER; note = uracil
gacctcctttgctggctctatt

SEQ ID NO: 637 - DNA, 23 bp, synthetic construct
  misc_feature 1..23: note = synthetic sequence
  source 1..23: mol_type = other DNA
  modified_base 14: mod_base = OTHER; note = uracil
  modified_base 20: mod_base = OTHER; note = uracil
cctcaacaacaagtttgcctcct

SEQ ID NO: 638 - DNA, 22 bp, synthetic construct
  misc_feature 1..22: note = synthetic sequence
  source 1..22: mol_type = other DNA
  modified_base 8: mod_base = OTHER; note = uracil
  modified_base 21: mod_base = OTHER; note = uracil
agcaatctgggcctcaaagatg

SEQ ID NO: 639 - DNA, 23 bp, synthetic construct
  misc_feature 1..23: note = synthetic sequence
  source 1..23: mol_type = other DNA
  modified_base 12: mod_base = OTHER; note = uracil
  modified_base 20: mod_base = OTHER; note = uracil
ccgagcaaaagtcaaatgatgcc

SEQ ID NO: 640 - DNA, 19 bp, synthetic construct
  misc_feature 1..19: note = synthetic sequence
  source 1..19: mol_type = other DNA
  modified_base 10: mod_base = OTHER; note = uracil
  modified_base 17: mod_base = OTHER; note = uracil
ggtggtgagtcacgtgtgt

SEQ ID NO: 641 - DNA, 19 bp, synthetic construct
  misc_feature 1..19: note = synthetic sequence
  source 1..19: mol_type = other DNA
  modified_base 9: mod_base = OTHER; note = uracil
  modified_base 14: mod_base = OTHER; note = uracil
gaacgcactgccctcagat

SEQ ID NO: 642 - DNA, 26 bp, synthetic construct
  misc_feature 1..26: note = synthetic sequence
  source 1..26: mol_type = other DNA
  modified_base 11: mod_base = OTHER; note = uracil
  modified_base 24: mod_base = OTHER; note = uracil
catcaaactctggtctggaagaatca

SEQ ID NO: 643 - DNA, 20 bp, synthetic construct
  misc_feature 1..20: note = synthetic sequence
  source 1..20: mol_type = other DNA
  modified_base 6: mod_base = OTHER; note = uracil
  modified_base 19: mod_base = OTHER; note = uracil
gtgcgtcagcagcaatgttt

SEQ ID NO: 644 - DNA, 19 bp, synthetic construct
  misc_feature 1..19: note = synthetic sequence
  source 1..19: mol_type = other DNA
  modified_base 8: mod_base = OTHER; note = uracil
  modified_base 17: mod_base = OTHER; note = uracil
gcaccactgtggcatctga

SEQ ID NO: 645 - DNA, 20 bp, synthetic construct
  misc_feature 1..20: note = synthetic sequence
  source 1..20: mol_type = other DNA
  modified_base 10: mod_base = OTHER; note = uracil
  modified_base 15: mod_base = OTHER; note = uracil
cgggagggcttctatcgaga

SEQ ID NO: 646 - DNA, 19 bp, synthetic construct
  misc_feature 1..19: note = synthetic sequence
  source 1..19: mol_type = other DNA
  modified_base 4: mod_base = OTHER; note = uracil
  modified_base 8: mod_base = OTHER; note = uracil
ccatccttgcagggacact

SEQ ID NO: 647 - DNA, 25 bp, synthetic construct
  misc_feature 1..25: note = synthetic sequence
  source 1..25: mol_type = other DNA
  modified_base 9: mod_base = OTHER; note = uracil
  modified_base 21: mod_base = OTHER; note = uracil
cctcctccttacctagacaatgaga

SEQ ID NO: 648 - DNA, 22 bp, synthetic construct
  misc_feature 1..22: note = synthetic sequence
  source 1..22: mol_type = other DNA
  modified_base 6: mod_base = OTHER; note = uracil
  modified_base 8: mod_base = OTHER; note = uracil
caagctatagcaagccaggact

SEQ ID NO: 649 - DNA, 25 bp, synthetic construct
  misc_feature 1..25: note = synthetic sequence
  source 1..25: mol_type = other DNA
  modified_base 7: mod_base = OTHER; note = uracil
  modified_base 17: mod_base = OTHER; note = uracil
atgtcatcacaatggatcccaaaga

SEQ ID NO: 650 - DNA, 20 bp, synthetic construct
  misc_feature 1..20: note = synthetic sequence
  source 1..20: mol_type = other DNA
  modified_base 9: mod_base = OTHER; note = uracil
  modified_base 15: mod_base = OTHER; note = uracil
acagcaggtgatgatggcaa

SEQ ID NO: 651 - DNA, 28 bp, synthetic construct
  misc_feature 1..28: note = synthetic sequence
  source 1..28: mol_type = other DNA
  modified_base 10: mod_base = OTHER; note = uracil
  modified_base 21: mod_base = OTHER; note = uracil
gtgagttgatcatcgaattctccaaaat

SEQ ID NO: 652 - DNA, 19 bp, synthetic construct
  misc_feature 1..19: note = synthetic sequence
  source 1..19: mol_type = other DNA
  modified_base 9: mod_base = OTHER; note = uracil
  modified_base 18: mod_base = OTHER; note = uracil
ccaccacgtcgtccatgtc

SEQ ID NO: 653 - DNA, 19 bp, synthetic construct
  misc_feature 1..19: note = synthetic sequence
  source 1..19: mol_type = other DNA
  modified_base 13: mod_base = OTHER; note = uracil
  modified_base 18: mod_base = OTHER; note = uracil
cctgagcaagcctggcatt

SEQ ID NO: 654 - DNA, 22 bp, synthetic construct
  misc_feature 1..22: note = synthetic sequence
  source 1..22: mol_type = other DNA
  modified_base 9: mod_base = OTHER; note = uracil
  modified_base 21: mod_base = OTHER; note = uracil
atcgagggtggtgtctgctata

SEQ ID NO: 655 - DNA, 20 bp, synthetic construct
  misc_feature 1..20: note = synthetic sequence
  source 1..20: mol_type = other DNA
  modified_base 8: mod_base = OTHER; note = uracil
  modified_base 14: mod_base = OTHER; note = uracil
gagattctcgccctgagcaa

SEQ ID NO: 656 - DNA, 23 bp, synthetic construct
  misc_feature 1..23: note = synthetic sequence
  source 1..23: mol_type = other DNA
  modified_base 9: mod_base = OTHER; note = uracil
  modified_base 20: mod_base = OTHER; note = uracil
agatcttctccttcagtgctcct

SEQ ID NO: 657 - DNA, 21 bp, synthetic construct
  misc_feature 1..21: note = synthetic sequence
  source 1..21: mol_type = other DNA
  modified_base 4: mod_base = OTHER; note = uracil
  modified_base 20: mod_base = OTHER; note = uracil
gtgtgagagcccggaagattt

SEQ ID NO: 658 - DNA, 21 bp, synthetic construct
  misc_feature 1..21: note = synthetic sequence
  source 1..21: mol_type = other DNA
  modified_base 13: mod_base = OTHER; note = uracil
  modified_base 20: mod_base = OTHER; note = uracil
tctgggcggcaatacgatttt

SEQ ID NO: 659 - DNA, 21 bp, synthetic construct
  misc_feature 1..21: note = synthetic sequence
  source 1..21: mol_type = other DNA
  modified_base 10: mod_base = OTHER; note = uracil
  modified_base 20: mod_base = OTHER; note = uracil
agtgaggccttttgctggatt

SEQ ID NO: 660 - DNA, 21 bp, synthetic construct
  misc_feature 1..21: note = synthetic sequence
  source 1..21: mol_type = other DNA
  modified_base 6: mod_base = OTHER; note = uracil
  modified_base 14: mod_base = OTHER; note = uracil
acagcttgaggcttgaagacc

SEQ ID NO: 661 - DNA, 19 bp, synthetic construct
  misc_feature 1..19: note = synthetic sequence
  source 1..19: mol_type = other DNA
  modified_base 7: mod_base = OTHER; note = uracil
  modified_base 18: mod_base = OTHER; note = uracil
cgccgctcaagtgaggatt

SEQ ID NO: 662 - DNA, 25 bp, synthetic construct
  misc_feature 1..25: note = synthetic sequence
  source 1..25: mol_type = other DNA
  modified_base 4: mod_base = OTHER; note = uracil
  modified_base 15: mod_base = OTHER; note = uracil
gggtacccatgagttagaagaggat

SEQ ID NO: 663 - DNA, 24 bp, synthetic construct
  misc_feature 1..24: note = synthetic sequence
  source 1..24: mol_type = other DNA
  modified_base 10: mod_base = OTHER; note = uracil
  modified_base 23: mod_base = OTHER; note = uracil
gctggaagatcatcgagagctatg

SEQ ID NO: 664 - DNA, 20 bp, synthetic construct
  misc_feature 1..20: note = synthetic sequence
  source 1..20: mol_type = other DNA
  modified_base 3: mod_base = OTHER; note = uracil
  modified_base 13: mod_base = OTHER; note = uracil
cctccaccaccttcccaaag

SEQ ID NO: 665 - DNA, 20 bp, synthetic construct
  misc_feature 1..20: note = synthetic sequence
  source 1..20: mol_type = other DNA
  modified_base 9: mod_base = OTHER; note = uracil
  modified_base 19: mod_base = OTHER; note = uracil
cgccatactacctgggcata

SEQ ID NO: 666 - DNA, 25 bp, synthetic construct
  misc_feature 1..25: note = synthetic sequence
  source 1..25: mol_type = other DNA
  modified_base 14: mod_base = OTHER; note = uracil
  modified_base 16: mod_base = OTHER; note = uracil
tcaaagaaacagctgtgaggagaaa

SEQ ID NO: 667 - DNA, 25 bp, synthetic construct
  misc_feature 1..25: note = synthetic sequence
  source 1..25: mol_type = other DNA
  modified_base 12: mod_base = OTHER; note = uracil
  modified_base 21: mod_base = OTHER; note = uracil
cattcaagaactcaaggagctcaga

SEQ ID NO: 668 - DNA, 23 bp, synthetic construct
  misc_feature 1..23: note = synthetic sequence
  source 1..23: mol_type = other DNA
  modified_base 10: mod_base = OTHER; note = uracil
  modified_base 22: mod_base = OTHER; note = uracil
acttagccatacagggctcctta

SEQ ID NO: 669 - DNA, 22 bp, synthetic construct
  misc_feature 1..22: note = synthetic sequence
  source 1..22: mol_type = other DNA
  modified_base 7: mod_base = OTHER; note = uracil
  modified_base 15: mod_base = OTHER; note = uracil
ccaaactgtcggcttcaaagag

SEQ ID NO: 670 - DNA, 21 bp, synthetic construct
  misc_feature 1..21: note = synthetic sequence
  source 1..21: mol_type = other DNA
  modified_base 7: mod_base = OTHER; note = uracil
  modified_base 19: mod_base = OTHER; note = uracil
tcctcctcagcagttccttca

SEQ ID NO: 671 - DNA, 27 bp, synthetic construct
  misc_feature 1..27: note = synthetic sequence
  source 1..27: mol_type = other DNA
  modified_base 13: mod_base = OTHER; note = uracil
  modified_base 23: mod_base = OTHER; note = uracil
agtaactcctcattcaagaccctacat

SEQ ID NO: 672 - DNA, 20 bp, synthetic construct
  misc_feature 1..20: note = synthetic sequence
  source 1..20: mol_type = other DNA
  modified_base 14: mod_base = OTHER; note = uracil
  modified_base 19: mod_base = OTHER; note = uracil
tgagccccaagaatgacctg

SEQ ID NO: 673 - DNA, 26 bp, synthetic construct
  misc_feature 1..26: note = synthetic sequence
  source 1..26: mol_type = other DNA
  modified_base 9: mod_base = OTHER; note = uracil
  modified_base 24: mod_base = OTHER; note = uracil
cccttatgtgacaatgtgaacactca

SEQ ID NO: 674 - DNA, 18 bp, synthetic construct
  misc_feature 1..18: note = synthetic sequence
  source 1..18: mol_type = other DNA
  modified_base 8: mod_base = OTHER; note = uracil
  modified_base 17: mod_base = OTHER; note = uracil
agcaccctttcggccttt

SEQ ID NO: 675 - DNA, 24 bp, synthetic construct
  misc_feature 1..24: note = synthetic sequence
  source 1..24: mol_type = other DNA
  modified_base 11: mod_base = OTHER; note = uracil
  modified_base 23: mod_base = OTHER; note = uracil
caaagaagcctcttcctcctactc

SEQ ID NO: 676 - DNA, 20 bp, synthetic construct
  misc_feature 1..20: note = synthetic sequence
  source 1..20: mol_type = other DNA
  modified_base 3: mod_base = OTHER; note = uracil
  modified_base 18: mod_base = OTHER; note = uracil
tgtccagcaggcagtactct

SEQ ID NO: 677 - DNA, 22 bp, synthetic construct
  misc_feature 1..22: note = synthetic sequence
  source 1..22: mol_type = other DNA
  modified_base 11: mod_base = OTHER; note = uracil
  modified_base 21: mod_base = OTHER; note = uracil
cttaagacggtgaggtcagctt

SEQ ID NO: 678 - DNA, 21 bp, synthetic construct
  misc_feature 1..21: note = synthetic sequence
  source 1..21: mol_type = other DNA
  modified_base 8: mod_base = OTHER; note = uracil
  modified_base 18: mod_base = OTHER; note = uracil
acactggtcactgctgatgag

SEQ ID NO: 679 - DNA, 21 bp, synthetic construct
  misc_feature 1..21: note = synthetic sequence
  source 1..21: mol_type = other DNA
  modified_base 12: mod_base = OTHER; note = uracil
  modified_base 19: mod_base = OTHER; note = uracil
ctcaatcccactgcccactac

SEQ ID NO: 680 - DNA, 24 bp, synthetic construct
  misc_feature 1..24: note = synthetic sequence
  source 1..24: mol_type = other DNA
  modified_base 10: mod_base = OTHER; note = uracil
  modified_base 20: mod_base = OTHER; note = uracil
aggagactctgggtgaacatacat

SEQ ID NO: 681 - DNA, 20 bp, synthetic construct
  misc_feature 1..20: note = synthetic sequence
  source 1..20: mol_type = other DNA
  modified_base 7: mod_base = OTHER; note = uracil
  modified_base 13: mod_base = OTHER; note = uracil
caggactccacctcagacct

SEQ ID NO: 682 - DNA, 23 bp, synthetic construct
  misc_feature 1..23: note = synthetic sequence
  source 1..23: mol_type = other DNA
  modified_base 10: mod_base = OTHER; note = uracil
  modified_base 21: mod_base = OTHER; note = uracil
ttttgcgggtctttgtcttctct

SEQ ID NO: 683 - DNA, 28 bp, synthetic construct
  misc_feature 1..28: note = synthetic sequence
  source 1..28: mol_type = other DNA
  modified_base 12: mod_base = OTHER; note = uracil
  modified_base 26: mod_base = OTHER; note = uracil
ccaagtgtccatacctcaatttctttca

SEQ ID NO: 684 - DNA, 21 bp, synthetic construct
  misc_feature 1..21: note = synthetic sequence
  source 1..21: mol_type = other DNA
  modified_base 4: mod_base = OTHER; note = uracil
  modified_base 14: mod_base = OTHER; note = uracil
ttgtgccagctcttcaacaga

SEQ ID NO: 685 - DNA, 21 bp, synthetic construct
  misc_feature 1..21: note = synthetic sequence
  source 1..21: mol_type = other DNA
  modified_base 10: mod_base = OTHER; note = uracil
  modified_base 17: mod_base = OTHER; note = uracil
ccgaaacactaccagctgcaa

SEQ ID NO: 686 - DNA, 29 bp, synthetic construct
  misc_feature 1..29: note = synthetic sequence
  source 1..29: mol_type = other DNA
  modified_base 13: mod_base = OTHER; note = uracil
  modified_base 28: mod_base = OTHER; note = uracil
tccgctctgtatttcttaaaagtctcttc

SEQ ID NO: 687 - DNA, 22 bp, synthetic construct
  misc_feature 1..22: note = synthetic sequence
  source 1..22: mol_type = other DNA
  modified_base 5: mod_base = OTHER; note = uracil
  modified_base 20: mod_base = OTHER; note = uracil
tgtgtccaagagagctcagtct

SEQ ID NO: 688 - DNA, 20 bp, synthetic construct
  misc_feature 1..20: note = synthetic sequence
  source 1..20: mol_type = other DNA
  modified_base 10: mod_base = OTHER; note = uracil
  modified_base 17: mod_base = OTHER; note = uracil
ccattcagcttgagggtcca

SEQ ID NO: 689 - DNA, 23 bp, synthetic construct
  misc_feature 1..23: note = synthetic sequence
  source 1..23: mol_type = other DNA
  modified_base 11: mod_base = OTHER; note = uracil
  modified_base 20: mod_base = OTHER; note = uracil
ggaagaggcatctcgtttgtact

SEQ ID NO: 690 - DNA, 25 bp, synthetic construct
  misc_feature 1..25: note = synthetic sequence
  source 1..25: mol_type = other DNA
  modified_base 9: mod_base = OTHER; note = uracil
  modified_base 22: mod_base = OTHER; note = uracil
gcctccattaaatctcgaccatagg

SEQ ID NO: 691 - DNA, 22 bp, synthetic construct
  misc_feature 1..22: note = synthetic sequence
  source 1..22: mol_type = other DNA
  modified_base 6: mod_base = OTHER; note = uracil
  modified_base 21: mod_base = OTHER; note = uracil
cgatctccagcccaagatgatt

SEQ ID NO: 692 - DNA, 21 bp, synthetic construct
  misc_feature 1..21: note = synthetic sequence
  source 1..21: mol_type = other DNA
  modified_base 7: mod_base = OTHER; note = uracil
  modified_base 17: mod_base = OTHER; note = uracil
cgacagtagaggagggtgagg

SEQ ID NO: 693 - DNA, 21 bp, synthetic construct
  misc_feature 1..21: note = synthetic sequence
  source 1..21: mol_type = other DNA
  modified_base 11: mod_base = OTHER; note = uracil
  modified_base 20: mod_base = OTHER; note = uracil
cacacctggattcccttcctt

SEQ ID NO: 694 - DNA, 22 bp, synthetic construct
  misc_feature 1..22: note = synthetic sequence
  source 1..22: mol_type = other DNA
  modified_base 2: mod_base = OTHER; note = uracil
  modified_base 10: mod_base = OTHER; note = uracil
gttttccagtcagagggacagt

SEQ ID NO: 695 - DNA, 20 bp, synthetic construct
  misc_feature 1..20: note = synthetic sequence
  source 1..20: mol_type = other DNA
ggaagtggtgctggttagga

SEQ ID NO: 696 - DNA, 24 bp, synthetic construct
  misc_feature 1..24: note = synthetic sequence
  source 1..24: mol_type = other DNA
  modified_base 10: mod_base = OTHER; note = uracil
  modified_base 19: mod_base = OTHER; note = uracil
cttagggagtgggagaagtcaaag

SEQ ID NO: 697 - DNA, 22 bp, synthetic construct
  misc_feature 1..22: note = synthetic sequence
  source 1..22: mol_type = other DNA
  modified_base 4: mod_base = OTHER; note = uracil
  modified_base 20: mod_base = OTHER; note = uracil
ctttgacagcgacaagaagtgg

SEQ ID NO: 698 - DNA, 19 bp, synthetic construct
  misc_feature 1..19: note = synthetic sequence
  source 1..19: mol_type = other DNA
  modified_base 8: mod_base = OTHER; note = uracil
  modified_base 16: mod_base = OTHER; note = uracil
ccctcagtgaagcggtaca

SEQ ID NO: 699 - DNA, 20 bp, synthetic construct
  misc_feature 1..20: note = synthetic sequence
  source 1..20: mol_type = other DNA
  modified_base 8: mod_base = OTHER; note = uracil
  modified_base 17: mod_base = OTHER; note = uracil
cgcaatgtcacccatctcct

SEQ ID NO: 700 - DNA, 23 bp, synthetic construct
  misc_feature 1..23: note = synthetic sequence
  source 1..23: mol_type = other DNA
  modified_base 13: mod_base = OTHER; note = uracil
  modified_base 21: mod_base = OTHER; note = uracil
tttcttttgtccttgggccttct

SEQ ID NO: 701 - DNA, 19 bp, synthetic construct
  misc_feature 1..19: note = synthetic sequence
  source 1..19: mol_type = other DNA
  modified_base 10: mod_base = OTHER; note = uracil
  modified_base 18: mod_base = OTHER; note = uracil
cttccccgattgccacgta

SEQ ID NO: 702 - DNA, 20 bp, synthetic construct
  misc_feature 1..20: note = synthetic sequence
  source 1..20: mol_type = other DNA
  modified_base 4: mod_base = OTHER; note = uracil
  modified_base 17: mod_base = OTHER; note = uracil
cggtccagcaggaatttggt

SEQ ID NO: 703 - DNA, 19 bp, synthetic construct
  misc_feature 1..19: note = synthetic sequence
  source 1..19: mol_type = other DNA
  modified_base 9: mod_base = OTHER; note = uracil
  modified_base 12: mod_base = OTHER; note = uracil
ctcccagctcttcaccgat

SEQ ID NO: 704 - DNA, 20 bp, synthetic construct
  misc_feature 1..20: note = synthetic sequence
  source 1..20: mol_type = other DNA
  modified_base 9: mod_base = OTHER; note = uracil
  modified_base 18: mod_base = OTHER; note = uracil
ctcccatttccctgcactca

SEQ ID NO: 705 - DNA, 20 bp, synthetic construct
  misc_feature 1..20: note = synthetic sequence
  source 1..20: mol_type = other DNA
  modified_base 8: mod_base = OTHER; note = uracil
  modified_base 10: mod_base = OTHER; note = uracil
ggaggaatgtcagcaccaga

SEQ ID NO: 706 - DNA, 25 bp, synthetic construct
  misc_feature 1..25: note = synthetic sequence
  source 1..25: mol_type = other DNA
  modified_base 13: mod_base = OTHER; note = uracil
  modified_base 23: mod_base = OTHER; note = uracil
tcacacatatgattaggccaactgt

SEQ ID NO: 707 - DNA, 21 bp, synthetic construct
  misc_feature 1..21: note = synthetic sequence
  source 1..21: mol_type = other DNA
  modified_base 12: mod_base = OTHER; note = uracil
  modified_base 16: mod_base = OTHER; note = uracil
tgcggaggaactttgtgaaca

SEQ ID NO: 708 - DNA, 20 bp, synthetic construct
  misc_feature 1..20: note = synthetic sequence
  source 1..20: mol_type = other DNA
  modified_base 10: mod_base = OTHER; note = uracil
  modified_base 13: mod_base = OTHER; note = uracil
aggcgaagatggtcagcaat

SEQ ID NO: 709 - DNA, 21 bp, synthetic construct
  misc_feature 1..21: note = synthetic sequence
  source 1..21: mol_type = other DNA
  modified_base 10: mod_base = OTHER; note = uracil
  modified_base 20: mod_base = OTHER; note = uracil
catggaagctgttgccaagtt

SEQ ID NO: 710 - DNA, 25 bp, synthetic construct
  misc_feature 1..25: note = synthetic sequence
  source 1..25: mol_type = other DNA
  modified_base 8: mod_base = OTHER; note = uracil
  modified_base 22: mod_base = OTHER; note = uracil
aaattcttgggcacatatccttcct

SEQ ID NO: 711 - DNA, 19 bp, synthetic construct
  misc_feature 1..19: note = synthetic sequence
  source 1..19: mol_type = other DNA
  modified_base 10: mod_base = OTHER; note = uracil
  modified_base 17: mod_base = OTHER; note = uracil
ggtcgacccttgccactac

SEQ ID NO: 712 - DNA, 22 bp, synthetic construct
  misc_feature 1..22: note = synthetic sequence
  source 1..22: mol_type = other DNA
  modified_base 7: mod_base = OTHER; note = uracil
  modified_base 15: mod_base = OTHER; note = uracil
agctgctgctaccttagaagga

SEQ ID NO: 713 - DNA, 20 bp, synthetic construct
  misc_feature 1..20: note = synthetic sequence
  source 1..20: mol_type = other DNA
  modified_base 9: mod_base = OTHER; note = uracil
  modified_base 18: mod_base = OTHER; note = uracil
gatcggcatcctgacagtga

SEQ ID NO: 714 - DNA, 22 bp, synthetic construct
  misc_feature 1..22: note = synthetic sequence
  source 1..22: mol_type = other DNA
  modified_base 10: mod_base = OTHER; note = uracil
  modified_base 21: mod_base = OTHER; note = uracil
cccttcttgtgggcatcttctt

SEQ ID NO: 715 - DNA, 20 bp, synthetic construct
  misc_feature 1..20: note = synthetic sequence
  source 1..20: mol_type = other DNA
  modified_base 8: mod_base = OTHER; note = uracil
  modified_base 14: mod_base = OTHER; note = uracil
gagattctcgccctgagcaa

SEQ ID NO: 716 - DNA, 18 bp, synthetic construct
  misc_feature 1..18: note = synthetic sequence
  source 1..18: mol_type = other DNA
  modified_base 4: mod_base = OTHER; note = uracil
  modified_base 17: mod_base = OTHER; note = uracil
tggtcagggcagcaggta

SEQ ID NO: 717 - DNA, 26 bp, synthetic construct
  misc_feature 1..26: note = synthetic sequence
  source 1..26: mol_type = other DNA
  modified_base 9: mod_base = OTHER; note = uracil
  modified_base 24: mod_base = OTHER; note = uracil
tgccgagctaaattacacattgatga

SEQ ID NO: 718 - DNA, 20 bp, synthetic construct
  misc_feature 1..20: note = synthetic sequence
  source 1..20: mol_type = other DNA
  modified_base 6: mod_base = OTHER; note = uracil
  modified_base 19: mod_base = OTHER; note = uracil
catggtcacagagccacctt

SEQ ID NO: 719 - DNA, 19 bp, synthetic construct
  misc_feature 1..19: note = synthetic sequence
  source 1..19: mol_type = other DNA
  modified_base 8: mod_base = OTHER; note = uracil
  modified_base 18: mod_base = OTHER; note = uracil
gtggccctgtaggaccttc

SEQ ID NO: 720 - DNA, 19 bp, synthetic construct
  misc_feature 1..19: note = synthetic sequence
  source 1..19: mol_type = other DNA
  modified_base 6: mod_base = OTHER; note = uracil
  modified_base 18: mod_base = OTHER; note = uracil
cgatgtcgcacggtacctg

SEQ ID NO: 721 - DNA, 23 bp, synthetic construct
  misc_feature 1..23: note = synthetic sequence
  source 1..23: mol_type = other DNA
  modified_base 7: mod_base = OTHER; note = uracil
  modified_base 14: mod_base = OTHER; note = uracil
ggcacctaccttttaaccacaga

SEQ ID NO: 722 - DNA, 20 bp, synthetic construct
  misc_feature 1..20: note = synthetic sequence
  source 1..20: mol_type = other DNA
  modified_base 9: mod_base = OTHER; note = uracil
  modified_base 19: mod_base = OTHER; note = uracil
cttcctgctgagccagtctt

SEQ ID NO: 723 - DNA, 28 bp, synthetic construct
  misc_feature 1..28: note = synthetic sequence
  source 1..28: mol_type = other DNA
  modified_base 11: mod_base = OTHER; note = uracil
  modified_base 27: mod_base = OTHER; note = uracil
ggattggaattgaggaagactgttacta

SEQ ID NO: 724 - DNA, 19 bp, synthetic construct
  misc_feature 1..19: note = synthetic sequence
  source 1..19: mol_type = other DNA
  modified_base 7: mod_base = OTHER; note = uracil
  modified_base 16: mod_base = OTHER; note = uracil
acgcagtctggttcatccc

SEQ ID NO: 725 - DNA, 23 bp, synthetic construct
  misc_feature 1..23: note = synthetic sequence
  source 1..23: mol_type = other DNA
  modified_base 8: mod_base = OTHER; note = uracil
  modified_base 18: mod_base = OTHER; note = uracil
atgacagtgcaggaagatcgaaa

SEQ ID NO: 726 - DNA, 20 bp, synthetic construct
  misc_feature 1..20: note = synthetic sequence
  source 1..20: mol_type = other DNA
  modified_base 11: mod_base = OTHER; note = uracil
  modified_base 15: mod_base = OTHER; note = uracil
ctgggccaccttgttacaca

SEQ ID NO: 727 - DNA, 22 bp, synthetic construct
  misc_feature 1..22: note = synthetic sequence
  source 1..22: mol_type = other DNA
  modified_base 10: mod_base = OTHER; note = uracil
  modified_base 13: mod_base = OTHER; note = uracil
ctccagccatactccacagaat

SEQ ID NO: 728 - DNA, 24 bp, synthetic construct
  misc_feature 1..24: note = synthetic sequence
  source 1..24: mol_type = other DNA
  modified_base 11: mod_base = OTHER; note = uracil
  modified_base 23: mod_base = OTHER; note = uracil
aacaaagaggtgaggtggaagatg

SEQ ID NO: 729 - DNA, 20 bp, synthetic construct
  misc_feature 1..20: note = synthetic sequence
  source 1..20: mol_type = other DNA
  modified_base 10: mod_base = OTHER; note = uracil
  modified_base 19: mod_base = OTHER; note = uracil
tgcctgggcttcatagcatt

SEQ ID NO: 730 - DNA, 22 bp, synthetic construct
  misc_feature 1..22: note = synthetic sequence
  source 1..22: mol_type = other DNA
  modified_base 10: mod_base = OTHER; note = uracil
  modified_base 19: mod_base = OTHER; note = uracil
gcagaatggtcatgaagatgcc

SEQ ID NO: 731 - DNA, 21 bp, synthetic construct
  misc_feature 1..21: note = synthetic sequence
  source 1..21: mol_type = other DNA
  modified_base 10: mod_base = OTHER; note = uracil
  modified_base 17: mod_base = OTHER; note = uracil
ccaagcgaatgaagcatccaa

SEQ ID NO: 732 - DNA, 19 bp, synthetic construct
  misc_feature 1..19: note = synthetic sequence
  source 1..19: mol_type = other DNA
  modified_base 8: mod_base = OTHER; note = uracil
  modified_base 18: mod_base = OTHER; note = uracil
gcctgggtccttcaacctc

SEQ ID NO: 733 - DNA, 19 bp, synthetic construct
  misc_feature 1..19: note = synthetic sequence
  source 1..19: mol_type = other DNA
  modified_base 9: mod_base = OTHER; note = uracil
  modified_base 17: mod_base = OTHER; note = uracil
ggagtggctccgcagatac

SEQ ID NO: 734 - DNA, 21 bp, synthetic construct
  misc_feature 1..21: note = synthetic sequence
  source 1..21: mol_type = other DNA
  modified_base 7: mod_base = OTHER; note = uracil
  modified_base 16: mod_base = OTHER; note = uracil
gtgatctccgcagggtagaaa

SEQ ID NO: 735 - DNA, 27 bp, synthetic construct
  misc_feature 1..27: note = synthetic sequence
  source 1..27: mol_type = other DNA
  modified_base 12: mod_base = OTHER; note = uracil
  modified_base 23: mod_base = OTHER; note = uracil
ttgagatttgctgatggaagcataaga

SEQ ID NO: 736 - DNA, 24 bp, synthetic construct
  misc_feature 1..24: note = synthetic sequence
  source 1..24: mol_type = other DNA
  modified_base 11: mod_base = OTHER; note = uracil
  modified_base 23: mod_base = OTHER; note = uracil
gtgctttaggtctccatagagctt

SEQ ID NO: 737 - DNA, 19 bp, synthetic construct
  misc_feature 1..19: note = synthetic sequence
  source 1..19: mol_type = other DNA
  modified_base 2: mod_base = OTHER; note = uracil
  modified_base 7: mod_base = OTHER; note = uracil
gtggactcccggagaggat

SEQ ID NO: 738 - DNA, 26 bp, synthetic construct
  misc_feature 1..26: note = synthetic sequence
  source 1..26: mol_type = other DNA
  modified_base 10: mod_base = OTHER; note = uracil
  modified_base 24: mod_base = OTHER; note = uracil
gagctaacgtcgatcttgtaagtctt

SEQ ID NO: 739 - DNA, 19 bp, synthetic construct
  misc_feature 1..19: note = synthetic sequence
  source 1..19: mol_type = other DNA
  modified_base 5: mod_base = OTHER; note = uracil
  modified_base 13: mod_base = OTHER; note = uracil
ccgttacaagcgtcaggga

SEQ ID NO: 740 - DNA, 21 bp, synthetic construct
  misc_feature 1..21: note = synthetic sequence
  source 1..21: mol_type = other DNA
  modified_base 11: mod_base = OTHER; note = uracil
  modified_base 18: mod_base = OTHER; note = uracil
agtcactcagttccccgtagt

SEQ ID NO: 741 - DNA, 20 bp, synthetic construct
  misc_feature 1..20: note = synthetic sequence
  source 1..20: mol_type = other DNA
  modified_base 7: mod_base = OTHER; note = uracil
  modified_base 16: mod_base = OTHER; note = uracil
caggtgtctgtctgctgcaa

SEQ ID NO: 742 - DNA, 27 bp, synthetic construct
  misc_feature 1..27: note = synthetic sequence
  source 1..27: mol_type = other DNA
  modified_base 10: mod_base = OTHER; note = uracil
  modified_base 26: mod_base = OTHER; note = uracil
gacgaagaatcagaagcagcagtaata

SEQ ID NO: 743 - DNA, 20 bp, synthetic construct
  misc_feature 1..20: note = synthetic sequence
  source 1..20: mol_type = other DNA
  modified_base 3: mod_base = OTHER; note = uracil
  modified_base 18: mod_base = OTHER; note = uracil
ggtggacggcaagaatgtga

SEQ ID NO: 744 - DNA, 20 bp, synthetic construct
  misc_feature 1..20: note = synthetic sequence
  source 1..20: mol_type = other DNA
  modified_base 10: mod_base = OTHER; note = uracil
  modified_base 19: mod_base = OTHER; note = uracil
gcctcattctggccaaggta

SEQ ID NO: 745 - DNA, 22 bp, synthetic construct
  misc_feature 1..22: note = synthetic sequence
  source 1..22: mol_type = other DNA
  modified_base 11: mod_base = OTHER; note = uracil
  modified_base 20: mod_base = OTHER; note = uracil
ggttcagagctttctggagtga

SEQ ID NO: 746 - DNA, 26 bp, synthetic construct
  misc_feature 1..26: note = synthetic sequence
  source 1..26: mol_type = other DNA
  modified_base 12: mod_base = OTHER; note = uracil
  modified_base 23: mod_base = OTHER; note = uracil
cttgcaatacataacaacctgctcaa

SEQ ID NO: 747 - DNA, 24 bp, synthetic construct
  misc_feature 1..24: note = synthetic sequence
  source 1..24: mol_type = other DNA
  modified_base 9: mod_base = OTHER; note = uracil
  modified_base 20: mod_base = OTHER; note = uracil
gcaatagatggctacagtgtcaga

SEQ ID NO: 748 - DNA, 22 bp, synthetic construct
  misc_feature 1..22: note = synthetic sequence
  source 1..22: mol_type = other DNA
  modified_base 9: mod_base = OTHER; note = uracil
  modified_base 19: mod_base = OTHER; note = uracil
agctgctgtacccattcttcag

SEQ ID NO: 749 - DNA, 19 bp, synthetic construct
  misc_feature 1..19: note = synthetic sequence
  source 1..19: mol_type = other DNA
  modified_base 8: mod_base = OTHER; note = uracil
  modified_base 17: mod_base = OTHER; note = uracil
ggtggagtgccgcttctac

SEQ ID NO: 750 - DNA, 21 bp, synthetic construct
  misc_feature 1..21: note = synthetic sequence
  source 1..21: mol_type = other DNA
  modified_base 9: mod_base = OTHER; note = uracil
  modified_base 19: mod_base = OTHER; note = uracil
gggtgccgtagttggagataa

SEQ ID NO: 751 - DNA, 22 bp, synthetic construct
  misc_feature 1..22: note = synthetic sequence
  source 1..22: mol_type = other DNA
  modified_base 7: mod_base = OTHER; note = uracil
  modified_base 15: mod_base = OTHER; note = uracil
aaaagttgtctgtgtgcgcaaa

SEQ ID NO: 752 - DNA, 21 bp, synthetic construct
  misc_feature 1..21: note = synthetic sequence
  source 1..21: mol_type = other DNA
  modified_base 12: mod_base = OTHER; note = uracil
  modified_base 19: mod_base = OTHER; note = uracil
ccccagcaaggttctttctgt

SEQ ID NO: 753 - DNA, 19 bp, synthetic construct
  misc_feature 1..19: note = synthetic sequence
  source 1..19: mol_type = other DNA
  modified_base 8: mod_base = OTHER; note = uracil
  modified_base 17: mod_base = OTHER; note = uracil
ggagtgctgttccgagtgg

SEQ ID NO: 754 - DNA, 23 bp, synthetic construct
  misc_feature 1..23: note = synthetic sequence
  source 1..23: mol_type = other DNA
  modified_base 5: mod_base = OTHER; note = uracil
  modified_base 10: mod_base = OTHER; note = uracil
tcgatacactggaagccaaaact

SEQ ID NO: 755 - DNA, 20 bp, synthetic construct
  misc_feature 1..20: note = synthetic sequence
  source 1..20: mol_type = other DNA
  modified_base 7: mod_base = OTHER; note = uracil
  modified_base 16: mod_base = OTHER; note = uracil
caccactggcatctctggaa

SEQ ID NO: 756 - DNA, 25 bp, synthetic construct
  misc_feature 1..25: note = synthetic sequence
  source 1..25: mol_type = other DNA
  modified_base 13: mod_base = OTHER; note = uracil
  modified_base 24: mod_base = OTHER; note = uracil
agatcgtatgagtgcattcccattg

SEQ ID NO: 757 - DNA, 21 bp, synthetic construct
  misc_feature 1..21: note = synthetic sequence
  source 1..21: mol_type = other DNA
  modified_base 9: mod_base = OTHER; note = uracil
  modified_base 20: mod_base = OTHER; note = uracil
cccccagatccagaccttctt

SEQ ID NO: 758 - DNA, 20 bp, synthetic construct
  misc_feature 1..20: note = synthetic sequence
  source 1..20: mol_type = other DNA
  modified_base 6: mod_base = OTHER; note = uracil
  modified_base 20: mod_base = OTHER; note = uracil
gctcttgccttctgctcaca

SEQ ID NO: 759 - DNA, 22 bp, synthetic construct
  misc_feature 1..22: note = synthetic sequence
  source 1..22: mol_type = other DNA
  modified_base 11: mod_base = OTHER; note = uracil
  modified_base 21: mod_base = OTHER; note = uracil
agcgaactcatctttgccagta

SEQ ID NO: 760 - DNA, 21 bp, synthetic construct
  misc_feature 1..21: note = synthetic sequence
  source 1..21: mol_type = other DNA
  modified_base 2: mod_base = OTHER; note = uracil
  modified_base 10: mod_base = OTHER; note = uracil
cttcagctctgacaccgacat

SEQ ID NO: 761 - DNA, 19 bp, synthetic construct
  misc_feature 1..19: note = synthetic sequence
  source 1..19: mol_type = other DNA
  modified_base 11: mod_base = OTHER; note = uracil
  modified_base 18: mod_base = OTHER; note = uracil
gcggccaggatggttctta

SEQ ID NO: 762 - DNA, 22 bp, synthetic construct
  misc_feature 1..22: note = synthetic sequence
  source 1..22: mol_type = other DNA
  modified_base 4: mod_base = OTHER; note = uracil
  modified_base 17: mod_base = OTHER; note = uracil
gtttagcacgaagctctccgat

SEQ ID NO: 763 - DNA, 20 bp, synthetic construct
  misc_feature 1..20: note = synthetic sequence
  source 1..20: mol_type = other DNA
  modified_base 8: mod_base = OTHER; note = uracil
  modified_base 17: mod_base = OTHER; note = uracil
accccaatcggaagcctaac

SEQ ID NO: 764 - DNA, 19 bp, synthetic construct
  misc_feature 1..19: note = synthetic sequence
  source 1..19: mol_type = other DNA
  modified_base 4: mod_base = OTHER; note = uracil
  modified_base 11: mod_base = OTHER; note = uracil
agatgagcattggcagcga

SEQ ID NO: 765 - DNA, 24 bp, synthetic construct
  misc_feature 1..24: note = synthetic sequence
  source 1..24: mol_type = other DNA
  modified_base 11: mod_base = OTHER; note = uracil
  modified_base 21: mod_base = OTHER; note = uracil
ttggctgtgatattgtgtgctaca

SEQ ID NO: 766 - DNA, 26 bp, synthetic construct
  misc_feature 1..26: note = synthetic sequence
  source 1..26: mol_type = other DNA
  modified_base 12: mod_base = OTHER; note = uracil
  modified_base 23: mod_base = OTHER; note = uracil
tttgtcacagttgttacttgggtaca

SEQ ID NO: 767 - DNA, 25 bp, synthetic construct
  misc_feature 1..25: note = synthetic sequence
  source 1..25: mol_type = other DNA
  modified_base 6: mod_base = OTHER; note = uracil
  modified_base 17: mod_base = OTHER; note = uracil
gcctctaccacttctatgaccagat

SEQ ID NO: 768 - DNA, 22 bp, synthetic construct
  misc_feature 1..22: note = synthetic sequence
  source 1..22: mol_type = other DNA
  modified_base 9: mod_base = OTHER; note = uracil
  modified_base 21: mod_base = OTHER; note = uracil
cataagcctccctggtctcttc

SEQ ID NO: 769 - DNA, 20 bp, synthetic construct
  misc_feature 1..20: note = synthetic sequence
  source 1..20: mol_type = other DNA
  modified_base 9: mod_base = OTHER; note = uracil
  modified_base 19: mod_base = OTHER; note = uracil
cccggaagtgcctaagtctt

SEQ ID NO: 770 - DNA, 20 bp, synthetic construct
  misc_feature 1..20: note = synthetic sequence
  source 1..20: mol_type = other DNA
  modified_base 7: mod_base = OTHER; note = uracil
  modified_base 17: mod_base = OTHER; note = uracil
cggcactcctccatgttgat

SEQ ID NO: 771 - DNA, 18 bp, synthetic construct
  misc_feature 1..18: note = synthetic sequence
  source 1..18: mol_type = other DNA
  modified_base 7: mod_base = OTHER; note = uracil
  modified_base 15: mod_base = OTHER; note = uracil
catgtttgcgcagctggt

SEQ ID NO: 772 - DNA, 23 bp, synthetic construct
  misc_feature 1..23: note = synthetic sequence
  source 1..23: mol_type = other DNA
  modified_base 10: mod_base = OTHER; note = uracil
  modified_base 21: mod_base = OTHER; note = uracil
gctccttcgtgtcctctttgtag

SEQ ID NO: 773 - DNA, 24 bp, synthetic construct
  misc_feature 1..24: note = synthetic sequence
  source 1..24: mol_type = other DNA
  modified_base 10: mod_base = OTHER; note = uracil
  modified_base 21: mod_base = OTHER; note = uracil
cgtgtactttaccaacgagctgaa

SEQ ID NO: 774 - DNA, 20 bp, synthetic construct
  misc_feature 1..20: note = synthetic sequence
  source 1..20: mol_type = other DNA
  modified_base 7: mod_base = OTHER; note = uracil
  modified_base 19: mod_base = OTHER; note = uracil
cggagttgccacttgacttg

SEQ ID NO: 775 - DNA, 21 bp, synthetic construct
  misc_feature 1..21: note = synthetic sequence
  source 1..21: mol_type = other DNA
  modified_base 5: mod_base = OTHER; note = uracil
  modified_base 20: mod_base = OTHER; note = uracil
gtgctccaccacctacaactt

SEQ ID NO: 776 - DNA, 21 bp, synthetic construct
  misc_feature 1..21: note = synthetic sequence
  source 1..21: mol_type = other DNA
  modified_base 8: mod_base = OTHER; note = uracil
  modified_base 19: mod_base = OTHER; note = uracil
tcagtggtgcagctgtcatag

SEQ ID NO: 777 - DNA, 23 bp, synthetic construct
  misc_feature 1..23: note = synthetic sequence
  source 1..23: mol_type = other DNA
  modified_base 8: mod_base = OTHER; note = uracil
  modified_base 20: mod_base = OTHER; note = uracil
gtgaccatgagcagtttgctaaa

SEQ ID NO: 778 - DNA, 22 bp, synthetic construct
  misc_feature 1..22: note = synthetic sequence
  source 1..22: mol_type = other DNA
  modified_base 12: mod_base = OTHER; note = uracil
  modified_base 19: mod_base = OTHER; note = uracil
ggtcagaccgatgtccattaca

SEQ ID NO: 779 - DNA, 22 bp, synthetic construct
  misc_feature 1..22: note = synthetic sequence
  source 1..22: mol_type = other DNA
  modified_base 15: mod_base = OTHER; note = uracil
  modified_base 21: mod_base = OTHER; note = uracil
agagagaagcgaggtttccatt

SEQ ID NO: 780 - DNA, 20 bp, synthetic construct
  misc_feature 1..20: note = synthetic sequence
  source 1..20: mol_type = other DNA
  modified_base 10: mod_base = OTHER; note = uracil
  modified_base 18: mod_base = OTHER; note = uracil
tctccttggtgctcctctgt

SEQ ID NO: 781 - DNA, 27 bp, synthetic construct
  misc_feature 1..27: note = synthetic sequence
  source 1..27: mol_type = other DNA
  modified_base 13: mod_base = OTHER; note = uracil
  modified_base 25: mod_base = OTHER; note = uracil
ctgtaactgctctaggtgcttcattat

SEQ ID NO: 782 - DNA, 20 bp, synthetic construct
  misc_feature 1..20: note = synthetic sequence
  source 1..20: mol_type = other DNA
  modified_base 13: mod_base = OTHER; note = uracil
  modified_base 18: mod_base = OTHER; note = uracil
aggccacagcactttcttct

SEQ ID NO: 783 - DNA, 26 bp, synthetic construct
  misc_feature 1..26: note = synthetic sequence
  source 1..26: mol_type = other DNA
  modified_base 7: mod_base = OTHER; note = uracil
  modified_base 20: mod_base = OTHER; note = uracil
agtacctccagaacagatttgagagt

SEQ ID NO: 784 - DNA, 19 bp, synthetic construct
  misc_feature 1..19: note = synthetic sequence
  source 1..19: mol_type = other DNA
  modified_base 10: mod_base = OTHER; note = uracil
  modified_base 17: mod_base = OTHER; note = uracil
tcagcaggctggcatttgt

SEQ ID NO: 785 - DNA, 27 bp, synthetic construct
  misc_feature 1..27: note = synthetic sequence
  source 1..27: mol_type = other DNA
  modified_base 12: mod_base = OTHER; note = uracil
  modified_base 25: mod_base = OTHER; note = uracil
cgttgcactggtataaaatcttactgg

SEQ ID NO: 786 - DNA, 26 bp, synthetic construct
  misc_feature 1..26: note = synthetic sequence
  source 1..26: mol_type = other DNA
  modified_base 9: mod_base = OTHER; note = uracil
  modified_base 20: mod_base = OTHER; note = uracil
cctcatactgagtggcatttgaacaa

SEQ ID NO: 787 - DNA, 19 bp, synthetic construct
  misc_feature 1..19: note = synthetic sequence
  source 1..19: mol_type = other DNA
  modified_base 10: mod_base = OTHER; note = uracil
  modified_base 13: mod_base = OTHER; note = uracil
agcgaccccttctcagact

SEQ ID NO: 788 - DNA, 21 bp, synthetic construct
  misc_feature 1..21: note = synthetic sequence
  source 1..21: mol_type = other DNA
  modified_base 13: mod_base = OTHER; note = uracil
  modified_base 17: mod_base = OTHER; note = uracil
cgatgaggacgatcgctagga

SEQ ID NO: 789 - DNA, 22 bp, synthetic construct
  misc_feature 1..22: note = synthetic sequence
  source 1..22: mol_type = other DNA
  modified_base 11: mod_base = OTHER; note = uracil
  modified_base 18: mod_base = OTHER; note = uracil
gagcatccagttggagttgaca

SEQ ID NO: 790 - DNA, 20 bp, synthetic construct
  misc_feature 1..20: note = synthetic sequence
  source 1..20: mol_type = other DNA
  modified_base 8: mod_base = OTHER; note = uracil
  modified_base 18: mod_base = OTHER; note = uracil
cctcccctttcttcccgtct

SEQ ID NO: 791 - DNA, 22 bp, synthetic construct
  misc_feature 1..22: note = synthetic sequence
  source 1..22: mol_type = other DNA
  modified_base 6: mod_base = OTHER; note = uracil
  modified_base 17: mod_base = OTHER; note = uracil
cctagtcaagcactggtaccaa

SEQ ID NO: 792 - DNA, 20 bp, synthetic construct
  misc_feature 1..20: note = synthetic sequence
  source 1..20: mol_type = other DNA
  modified_base 11: mod_base = OTHER; note = uracil
  modified_base 18: mod_base = OTHER; note = uracil
tccaagaccgtccgaaatcc

SEQ ID NO: 793 - DNA, 20 bp, synthetic construct
  misc_feature 1..20: note = synthetic sequence
  source 1..20: mol_type = other DNA
  modified_base 8: mod_base = OTHER; note = uracil
  modified_base 18: mod_base = OTHER; note = uracil
tgtggcatggtttgcattgg

SEQ ID NO: 794 - DNA, 28 bp, synthetic construct
  misc_feature 1..28: note = synthetic sequence
  source 1..28: mol_type = other DNA
  modified_base 14: mod_base = OTHER; note = uracil
  modified_base 26: mod_base = OTHER; note = uracil
cttctctccagagtgtaactttatgtgt

SEQ ID NO: 795 - DNA, 19 bp, synthetic construct
  misc_feature 1..19: note = synthetic sequence
  source 1..19: mol_type = other DNA
  modified_base 10: mod_base = OTHER; note = uracil
  modified_base 12: mod_base = OTHER; note = uracil
gccagaccctctggagaag

SEQ ID NO: 796 - DNA, 20 bp, synthetic construct
  misc_feature 1..20: note = synthetic sequence
  source 1..20: mol_type = other DNA
  modified_base 7: mod_base = OTHER; note = uracil
  modified_base 15: mod_base = OTHER; note = uracil
tggagctcacagggtaggaa

SEQ ID NO: 797 - DNA, 19 bp, synthetic construct
  misc_feature 1..19: note = synthetic sequence
  source 1..19: mol_type = other DNA
  modified_base 12: mod_base = OTHER; note = uracil
  modified_base 18: mod_base = OTHER; note = uracil
ccactcacacctgcagcta

SEQ ID NO: 798 - DNA, 18 bp, synthetic construct
  misc_feature 1..18: note = synthetic sequence
  source 1..18: mol_type = other DNA
  modified_base 4: mod_base = OTHER; note = uracil
  modified_base 17: mod_base = OTHER; note = uracil
gtctgagcgcgcaaactt

SEQ ID NO: 799 - DNA, 21 bp, synthetic construct
  misc_feature 1..21: note = synthetic sequence
  source 1..21: mol_type = other DNA
  modified_base 6: mod_base = OTHER; note = uracil
  modified_base 8: mod_base = OTHER; note = uracil
gcgagtatggagcagaaacga

SEQ ID NO: 800 - DNA, 24 bp, synthetic construct
  misc_feature 1..24: note = synthetic sequence
  source 1..24: mol_type = other DNA
  modified_base 10: mod_base = OTHER; note = uracil
  modified_base 17: mod_base = OTHER; note = uracil
aattccaaatgagctctccaacca

SEQ ID NO: 801 - DNA, 19 bp, synthetic construct
  misc_feature 1..19: note = synthetic sequence
  source 1..19: mol_type = other DNA
  modified_base 8: mod_base = OTHER; note = uracil
  modified_base 16: mod_base = OTHER; note = uracil
ggtgtccttgggtgctgat

SEQ ID NO: 802 - DNA, 24 bp, synthetic construct
  misc_feature 1..24: note = synthetic sequence
  source 1..24: mol_type = other DNA
  modified_base 12: mod_base = OTHER; note = uracil
  modified_base 22: mod_base = OTHER; note = uracil
aatagccctggtaggtaactctgt

SEQ ID NO: 803 - DNA, 25 bp, synthetic construct
  misc_feature 1..25: note = synthetic sequence
  source 1..25: mol_type = other DNA
  modified_base 15: mod_base = OTHER; note = uracil
  modified_base 24: mod_base = OTHER; note = uracil
aatgatgttccccatatccagtgtg

SEQ ID NO: 804 - DNA, 19 bp, synthetic construct
  misc_feature 1..19: note = synthetic sequence
  source 1..19: mol_type = other DNA
  modified_base 10: mod_base = OTHER; note = uracil
  modified_base 17: mod_base = OTHER; note = uracil
agagaaggctcccctgtga

SEQ ID NO: 805 - DNA, 22 bp, synthetic construct
  misc_feature 1..22: note = synthetic sequence
  source 1..22: mol_type = other DNA
  modified_base 8: mod_base = OTHER; note = uracil
  modified_base 15: mod_base = OTHER; note = uracil
ctggtggttccatttgcaaagg

SEQ ID NO: 806 - DNA, 24 bp, synthetic construct
  misc_feature 1..24: note = synthetic sequence
  source 1..24: mol_type = other DNA
  modified_base 14: mod_base = OTHER; note = uracil
  modified_base 21: mod_base = OTHER; note = uracil
ctgatgaagcagctgagagatgat

SEQ ID NO: 807 - DNA, 21 bp, synthetic construct
  misc_feature 1..21: note = synthetic sequence
  source 1..21: mol_type = other DNA
  modified_base 12: mod_base = OTHER; note = uracil
  modified_base 15: mod_base = OTHER; note = uracil
cagggaaggcctcctacaaag

SEQ ID NO: 808 - DNA, 20 bp, synthetic construct
  misc_feature 1..20: note = synthetic sequence
  source 1..20: mol_type = other DNA
  modified_base 8: mod_base = OTHER; note = uracil
  modified_base 18: mod_base = OTHER; note = uracil
tctctggacccactctgtca

SEQ ID NO: 809 - DNA, 19 bp, synthetic construct
  misc_feature 1..19: note = synthetic sequence
  source 1..19: mol_type = other DNA
  modified_base 11: mod_base = OTHER; note = uracil
  modified_base 15: mod_base = OTHER; note = uracil
gaatcccagctgactcgct

SEQ ID NO: 810 - DNA, 25 bp, synthetic construct
  misc_feature 1..25: note = synthetic sequence
  source 1..25: mol_type = other DNA
  modified_base 12: mod_base = OTHER; note = uracil
  modified_base 22: mod_base = OTHER; note = uracil
ccacatggccatatattggaatgga

SEQ ID NO: 811 - DNA, 22 bp, synthetic construct
  misc_feature 1..22: note = synthetic sequence
  source 1..22: mol_type = other DNA
  modified_base 12: mod_base = OTHER; note = uracil
  modified_base 21: mod_base = OTHER; note = uracil
acctctcatgctctgctctctt

SEQ ID NO: 812 - DNA, 21 bp, synthetic construct
  misc_feature 1..21: note = synthetic sequence
  source 1..21: mol_type = other DNA
  modified_base 7: mod_base = OTHER; note = uracil
  modified_base 20: mod_base = OTHER; note = uracil
accatctagccccaaggagtt

SEQ ID NO: 813 - DNA, 22 bp, synthetic construct
  misc_feature 1..22: note = synthetic sequence
  source 1..22: mol_type = other DNA
  modified_base 12: mod_base = OTHER; note = uracil
  modified_base 21: mod_base = OTHER; note = uracil
ctttgatgtgcttcctgccttt

SEQ ID NO: 814 - DNA, 19 bp, synthetic construct
  misc_feature 1..19: note = synthetic sequence
  source 1..19: mol_type = other DNA
  modified_base 4: mod_base = OTHER; note = uracil
  modified_base 14: mod_base = OTHER; note = uracil
cgctgcaggactgtgaaac

SEQ ID NO: 815 - DNA, 21 bp, synthetic construct
  misc_feature 1..21: note = synthetic sequence
  source 1..21: mol_type = other DNA
  modified_base 11: mod_base = OTHER; note = uracil
  modified_base 19: mod_base = OTHER; note = uracil
cgctcaggaatcatgggctat

SEQ ID NO: 816 - DNA, 20 bp, synthetic construct
  misc_feature 1..20: note = synthetic sequence
  source 1..20: mol_type = other DNA
  modified_base 10: mod_base = OTHER; note = uracil
  modified_base 19: mod_base = OTHER; note = uracil
gccagaccgtctccttcttt

SEQ ID NO: 817 - DNA, 24 bp, synthetic construct
  misc_feature 1..24: note = synthetic sequence
  source 1..24: mol_type = other DNA
  modified_base 12: mod_base = OTHER; note = uracil
  modified_base 22: mod_base = OTHER; note = uracil
aagtgcttacattacagcgactct

SEQ ID NO: 818 - DNA, 21 bp, synthetic construct
  misc_feature 1..21: note = synthetic sequence
  source 1..21: mol_type = other DNA
  modified_base 3: mod_base = OTHER; note = uracil
  modified_base 12: mod_base = OTHER; note = uracil
gcttctcatggtggagcacat

SEQ ID NO: 819 - DNA, 21 bp, synthetic construct
  misc_feature 1..21: note = synthetic sequence
  source 1..21: mol_type = other DNA
  modified_base 9: mod_base = OTHER; note = uracil
  modified_base 14: mod_base = OTHER; note = uracil
acacagcctaaagtcagcaca

SEQ ID NO: 820 - DNA, 19 bp, synthetic construct
  misc_feature 1..19: note = synthetic sequence
  source 1..19: mol_type = other DNA
  modified_base 6: mod_base = OTHER; note = uracil
  modified_base 15: mod_base = OTHER; note = uracil
cggaatggaacgcctggaa

SEQ ID NO: 821 - DNA, 24 bp, synthetic construct
  misc_feature 1..24: note = synthetic sequence
  source 1..24: mol_type = other DNA
  modified_base 10: mod_base = OTHER; note = uracil
  modified_base 18: mod_base = OTHER; note = uracil
gccaaccaatgtgctattcaaact

SEQ ID NO: 822 - DNA, 18 bp, synthetic construct
  misc_feature 1..18: note = synthetic sequence
  source 1..18: mol_type = other DNA
  modified_base 12: mod_base = OTHER; note = uracil
  modified_base 17: mod_base = OTHER; note = uracil
acctggcagcgtagggta

SEQ ID NO: 823 - DNA, 23 bp, synthetic construct
  misc_feature 1..23: note = synthetic sequence
  source 1..23: mol_type = other DNA
  modified_base 10: mod_base = OTHER; note = uracil
  modified_base 22: mod_base = OTHER; note = uracil
agctccaagtcctcacacagata

SEQ ID NO: 824 - DNA, 19 bp, synthetic construct
  misc_feature 1..19: note = synthetic sequence
  source 1..19: mol_type = other DNA
  modified_base 5: mod_base = OTHER; note = uracil
  modified_base 17: mod_base = OTHER; note = uracil
ggactccccggttcattgt

SEQ ID NO: 825 - DNA, 19 bp, synthetic construct
  misc_feature 1..19: note = synthetic sequence
  source 1..19: mol_type = other DNA
  modified_base 6: mod_base = OTHER; note = uracil
  modified_base 16: mod_base = OTHER; note = uracil
gcccttgcacatgcctact

SEQ ID NO: 826 - DNA, 21 bp, synthetic construct
  misc_feature 1..21: note = synthetic sequence
  source 1..21: mol_type = other DNA
  modified_base 13: mod_base = OTHER; note = uracil
  modified_base 20: mod_base = OTHER; note = uracil
gtggcacaaagctgatgactt

SEQ ID NO: 827 - DNA, 20 bp, synthetic construct
  misc_feature 1..20: note = synthetic sequence
  source 1..20: mol_type = other DNA
  modified_base 3: mod_base = OTHER; note = uracil
  modified_base 19: mod_base = OTHER; note = uracil
cctcacaggacaccagcttc

SEQ ID NO: 828 - DNA, 19 bp, synthetic construct
  misc_feature 1..19: note = synthetic sequence
  source 1..19: mol_type = other DNA
  modified_base 10: mod_base = OTHER; note = uracil
  modified_base 17: mod_base = OTHER; note = uracil
agctgggcctgggagatat

SEQ ID NO: 829 - DNA, 19 bp, synthetic construct
  misc_feature 1..19: note = synthetic sequence
  source 1..19: mol_type = other DNA
  modified_base 10: mod_base = OTHER; note = uracil
  modified_base 15: mod_base = OTHER; note = uracil
gtggcgacctcacttacga

SEQ ID NO: 830 - DNA, 21 bp, synthetic construct
  misc_feature 1..21: note = synthetic sequence
  source 1..21: mol_type = other DNA
  modified_base 11: mod_base = OTHER; note = uracil
  modified_base 20: mod_base = OTHER; note = uracil
aggagggcactggcagttata

SEQ ID NO: 831 - DNA, 20 bp, synthetic construct
  misc_feature 1..20: note = synthetic sequence
  source 1..20: mol_type = other DNA
  modified_base 9: mod_base = OTHER; note = uracil
  modified_base 16: mod_base = OTHER; note = uracil
cccagacctcactgctcaga

SEQ ID NO: 832 - DNA, 22 bp, synthetic construct
  misc_feature 1..22: note = synthetic sequence
  source 1..22: mol_type = other DNA
  modified_base 8: mod_base = OTHER; note = uracil
  modified_base 16: mod_base = OTHER; note = uracil
aggatccttccagggtacgaat

SEQ ID NO: 833 - DNA, 23 bp, synthetic construct
  misc_feature 1..23: note = synthetic sequence
  source 1..23: mol_type = other DNA
  modified_base 6: mod_base = OTHER; note = uracil
  modified_base 18: mod_base = OTHER; note = uracil
ccaattggaacctgggatcaagt

SEQ ID NO: 834 - DNA, 22 bp, synthetic construct
  misc_feature 1..22: note = synthetic sequence
  source 1..22: mol_type = other DNA
  modified_base 9: mod_base = OTHER; note = uracil
  modified_base 19: mod_base = OTHER; note = uracil
ccatgtgatctgacaccctgaa

SEQ ID NO: 835 - DNA, 21 bp, synthetic construct
  misc_feature 1..21: note = synthetic sequence
  source 1..21: mol_type = other DNA
  modified_base 9: mod_base = OTHER; note = uracil
  modified_base 20: mod_base = OTHER; note = uracil
ccacctcctgcatagagggta

SEQ ID NO: 836 - DNA, 26 bp, synthetic construct
  misc_feature 1..26: note = synthetic sequence
  source 1..26: mol_type = other DNA
  modified_base 9: mod_base = OTHER; note = uracil
  modified_base 25: mod_base = OTHER; note = uracil
cgcataactcacaggaaccagatatt

SEQ ID NO: 837 - DNA, 22 bp, synthetic construct
  misc_feature 1..22: note = synthetic sequence
  source 1..22: mol_type = other DNA
  modified_base 12: mod_base = OTHER; note = uracil
  modified_base 21: mod_base = OTHER; note = uracil
acacacatgcctttgagtggtt

SEQ ID NO: 838 - DNA, 21 bp, synthetic construct
  misc_feature 1..21: note = synthetic sequence
  source 1..21: mol_type = other DNA
  modified_base 3: mod_base = OTHER; note = uracil
  modified_base 9: mod_base = OTHER; note = uracil
catcatggtgcacagcaaagt

SEQ ID NO: 839 - DNA, 23 bp, synthetic construct
  misc_feature 1..23: note = synthetic sequence
  source 1..23: mol_type = other DNA
  modified_base 11: mod_base = OTHER; note = uracil
  modified_base 22: mod_base = OTHER; note = uracil
ggcccaagactccaaccatttta

SEQ ID NO: 840 - DNA, 20 bp, synthetic construct
  misc_feature 1..20: note = synthetic sequence
  source 1..20: mol_type = other DNA
  modified_base 5: mod_base = OTHER; note = uracil
  modified_base 13: mod_base = OTHER; note = uracil
tgagtgagcggctaggagaa

SEQ ID NO: 841 - DNA, 21 bp, synthetic construct
  misc_feature 1..21: note = synthetic sequence
  source 1..21: mol_type = other DNA
  modified_base 11: mod_base = OTHER; note = uracil
  modified_base 20: mod_base = OTHER; note = uracil
acaggagccatgcaagaagtt

SEQ ID NO: 842 - DNA, 23 bp, synthetic construct
  misc_feature 1..23: note = synthetic sequence
  source 1..23: mol_type = other DNA
  modified_base 9: mod_base = OTHER; note = uracil
  modified_base 19: mod_base = OTHER; note = uracil
gcccattgttcatagggttgagt

SEQ ID NO: 843 - DNA, 22 bp, synthetic construct
  misc_feature 1..22: note = synthetic sequence
  source 1..22: mol_type = other DNA
  modified_base 9: mod_base = OTHER; note = uracil
  modified_base 18: mod_base = OTHER; note = uracil
agcttttctgtggctggtgaat

SEQ ID NO: 844 - DNA, 24 bp, synthetic construct
  misc_feature 1..24: note = synthetic sequence
  source 1..24: mol_type = other DNA
  modified_base 9: mod_base = OTHER; note = uracil
  modified_base 22: mod_base = OTHER; note = uracil
ccatccagtgggactatgggataa

SEQ ID NO: 845 - DNA, 20 bp, synthetic construct
  misc_feature 1..20: note = synthetic sequence
  source 1..20: mol_type = other DNA
  modified_base 11: mod_base = OTHER; note = uracil
  modified_base 18: mod_base = OTHER; note = uracil
ccagcacccatgagttgtga

SEQ ID NO: 846 - DNA, 18 bp, synthetic construct
  misc_feature 1..18: note = synthetic sequence
  source 1..18: mol_type = other DNA
  modified_base 8: mod_base = OTHER; note = uracil
  modified_base 11: mod_base = OTHER; note = uracil
ccgcaactcttgggcgat

SEQ ID NO: 847 - DNA, 19 bp, synthetic construct
  misc_feature 1..19: note = synthetic sequence
  source 1..19: mol_type = other DNA
  modified_base 5: mod_base = OTHER; note = uracil
  modified_base 9: mod_base = OTHER; note = uracil
cgagtacgtgccacaccaa

SEQ ID NO: 848 - DNA, 25 bp, synthetic construct
  misc_feature 1..25: note = synthetic sequence
  source 1..25: mol_type = other DNA
  modified_base 11: mod_base = OTHER; note = uracil
  modified_base 19: mod_base = OTHER; note = uracil
cattgaattcttcctggatgccaaa

SEQ ID NO: 849 - DNA, 20 bp, synthetic construct
  misc_feature 1..20: note = synthetic sequence
  source 1..20: mol_type = other DNA
  modified_base 9: mod_base = OTHER; note = uracil
  modified_base 19: mod_base = OTHER; note = uracil
gccgggaatacagtcgcttt

SEQ ID NO: 850 - DNA, 20 bp, synthetic construct
  misc_feature 1..20: note = synthetic sequence
  source 1..20: mol_type = other DNA
  modified_base 9: mod_base = OTHER; note = uracil
  modified_base 17: mod_base = OTHER; note = uracil
agtgtccctccctccttcag

SEQ ID NO: 851 - DNA, 25 bp, synthetic construct
  misc_feature 1..25: note = synthetic sequence
  source 1..25: mol_type = other DNA
  modified_base 11: mod_base = OTHER; note = uracil
  modified_base 23: mod_base = OTHER; note = uracil
tgctccagtttttcagaagaagtga

SEQ ID NO: 852 - DNA, 21 bp, synthetic construct
  misc_feature 1..21: note = synthetic sequence
  source 1..21: mol_type = other DNA
  modified_base 12: mod_base = OTHER; note = uracil
  modified_base 19: mod_base = OTHER; note = uracil
tccgggcacacttacatttgt

SEQ ID NO: 853 - DNA, 20 bp, synthetic construct
  misc_feature 1..20: note = synthetic sequence
  source 1..20: mol_type = other DNA
  modified_base 9: mod_base = OTHER; note = uracil
  modified_base 17: mod_base = OTHER; note = uracil
cctacagctgcagtcttcca

SEQ ID NO: 854 - DNA, 19 bp, synthetic construct
  misc_feature 1..19: note = synthetic sequence
  source 1..19: mol_type = other DNA
  modified_base 9: mod_base = OTHER; note = uracil
  modified_base 16: mod_base = OTHER; note = uracil
aacgttgttgggctctcct

SEQ ID NO: 855 - DNA, 26 bp, synthetic construct
  misc_feature 1..26: note = synthetic sequence
  source 1..26: mol_type = other DNA
  modified_base 9: mod_base = OTHER; note = uracil
  modified_base 19: mod_base = OTHER; note = uracil
aacaatcctaaaggaagatccagcaa

SEQ ID NO: 856 - DNA, 19 bp, synthetic construct
  misc_feature 1..19: note = synthetic sequence
  source 1..19: mol_type = other DNA
  modified_base 11: mod_base = OTHER; note = uracil
  modified_base 18: mod_base = OTHER; note = uracil
gggagtgcactgctgtcta

SEQ ID NO: 857 - DNA, 20 bp, synthetic construct
  misc_feature 1..20: note = synthetic sequence
  source 1..20: mol_type = other DNA
  modified_base 4: mod_base = OTHER; note = uracil
  modified_base 13: mod_base = OTHER; note = uracil
ccgtggagcaggtgaagaat

SEQ ID NO: 858 - DNA, 23 bp, synthetic construct
  misc_feature 1..23: note = synthetic sequence
  source 1..23: mol_type = other DNA
  modified_base 10: mod_base = OTHER; note = uracil
  modified_base 22: mod_base = OTHER; note = uracil
tctatagagtcgccaccctgatg

SEQ ID NO: 859 - DNA, 25 bp, synthetic construct
  misc_feature 1..25: note = synthetic sequence
  source 1..25: mol_type = other DNA
  modified_base 7: mod_base = OTHER; note = uracil
  modified_base 21: mod_base = OTHER; note = uracil
ggctgctgcattacataatctggat

SEQ ID NO: 860 - DNA, 22 bp, synthetic construct
  misc_feature 1..22: note = synthetic sequence
  source 1..22: mol_type = other DNA
  modified_base 10: mod_base = OTHER; note = uracil
  modified_base 21: mod_base = OTHER; note = uracil
agcactggttggtcttcatctt

SEQ ID NO: 861 - DNA, 20 bp, synthetic construct
  misc_feature 1..20: note = synthetic sequence
  source 1..20: mol_type = other DNA
  modified_base 2: mod_base = OTHER; note = uracil
  modified_base 16: mod_base = OTHER; note = uracil
gtgccagacaaacctctcca

SEQ ID NO: 862 - DNA, 23 bp, synthetic construct
  misc_feature 1..23: note = synthetic sequence
  source 1..23: mol_type = other DNA
  modified_base 14: mod_base = OTHER; note = uracil
  modified_base 20: mod_base = OTHER; note = uracil
ttatgcagagcagtgttcttcca

SEQ ID NO: 863 - DNA, 26 bp, synthetic construct
  misc_feature 1..26: note = synthetic sequence
  source 1..26: mol_type = other DNA
  modified_base 12: mod_base = OTHER; note = uracil
  modified_base 25: mod_base = OTHER; note = uracil
tcacactttcatgagttcctccattt

SEQ ID NO: 864 - DNA, 27 bp, synthetic construct
  misc_feature 1..27: note = synthetic sequence
  source 1..27: mol_type = other DNA
  modified_base 11: mod_base = OTHER; note = uracil
  modified_base 26: mod_base = OTHER; note = uracil
gacatcagcatggtcatctgtaaagta

SEQ ID NO: 865 - DNA, 20 bp, synthetic construct
  misc_feature 1..20: note = synthetic sequence
  source 1..20: mol_type = other DNA
  modified_base 10: mod_base = OTHER; note = uracil
  modified_base 19: mod_base = OTHER; note = uracil
ccacgtcggtgaccatcttt

SEQ ID NO: 866 - DNA, 20 bp, synthetic construct
  misc_feature 1..20: note = synthetic sequence
  source 1..20: mol_type = other DNA
  modified_base 11: mod_base = OTHER; note = uracil
  modified_base 19: mod_base = OTHER; note = uracil
ggagcaaagctgctgggata

SEQ ID NO: 867 - DNA, 20 bp, synthetic construct
  misc_feature 1..20: note = synthetic sequence
  source 1..20: mol_type = other DNA
  modified_base 8: mod_base = OTHER; note = uracil
  modified_base 18: mod_base = OTHER; note = uracil
tgggtggtcctgcaaaatcc

SEQ ID NO: 868 - DNA, 27 bp, synthetic construct
  misc_feature 1..27: note = synthetic sequence
  source 1..27: mol_type = other DNA
  modified_base 12: mod_base = OTHER; note = uracil
  modified_base 25: mod_base = OTHER; note = uracil
acatattgatttggagccagttcttca

SEQ ID NO: 869 - DNA, 20 bp, synthetic construct
  misc_feature 1..20: note = synthetic sequence
  source 1..20: mol_type = other DNA
  modified_base 12: mod_base = OTHER; note = uracil
  modified_base 19: mod_base = OTHER; note = uracil
caacctgaccctgctggata

SEQ ID NO: 870 - DNA, 20 bp, synthetic construct
  misc_feature 1..20: note = synthetic sequence
  source 1..20: mol_type = other DNA
  modified_base 6: mod_base = OTHER; note = uracil
  modified_base 10: mod_base = OTHER; note = uracil
gaggatgggtacaccacaca

SEQ ID NO: 871 - DNA, 20 bp, synthetic construct
  misc_feature 1..20: note = synthetic sequence
  source 1..20: mol_type = other DNA
  modified_base 4: mod_base = OTHER; note = uracil
  modified_base 18: mod_base = OTHER; note = uracil
cactgagaggaagcgcatga

SEQ ID NO: 872 - DNA, 18 bp, synthetic construct
  misc_feature 1..18: note = synthetic sequence
  source 1..18: mol_type = other DNA
  modified_base 7: mod_base = OTHER; note = uracil
  modified_base 9: mod_base = OTHER; note = uracil
cagacgtctcccggacaa

SEQ ID NO: 873 - DNA, 20 bp, synthetic construct
  misc_feature 1..20: note = synthetic sequence
  source 1..20: mol_type = other DNA
  modified_base 4: mod_base = OTHER; note = uracil
  modified_base 8: mod_base = OTHER; note = uracil
gactatctgcgccagggaaa

SEQ ID NO: 874 - DNA, 21 bp, synthetic construct
  misc_feature 1..21: note = synthetic sequence
  source 1..21: mol_type = other DNA
  modified_base 6: mod_base = OTHER; note = uracil
  modified_base 17: mod_base = OTHER; note = uracil
ggccttcagtgtgttctccaa

SEQ ID NO: 875 - DNA, 21 bp, synthetic construct
  misc_feature 1..21: note = synthetic sequence
  source 1..21: mol_type = other DNA
  modified_base 11: mod_base = OTHER; note = uracil
  modified_base 20: mod_base = OTHER; note = uracil
gcccttgagatttgaggcctt

SEQ ID NO: 876 - DNA, 24 bp, synthetic construct
  misc_feature 1..24: note = synthetic sequence
  source 1..24: mol_type = other DNA
  modified_base 10: mod_base = OTHER; note = uracil
  modified_base 23: mod_base = OTHER; note = uracil
acatcctcctgaagagtggttttg

SEQ ID NO: 877 - DNA, 19 bp, synthetic construct
  misc_feature 1..19: note = synthetic sequence
  source 1..19: mol_type = other DNA
  modified_base 9: mod_base = OTHER; note = uracil
  modified_base 17: mod_base = OTHER; note = uracil
cgctgctgtgcccatctat

SEQ ID NO: 878 - DNA, 21 bp, synthetic construct
  misc_feature 1..21: note = synthetic sequence
  source 1..21: mol_type = other DNA
  modified_base 6: mod_base = OTHER; note = uracil
  modified_base 20: mod_base = OTHER; note = uracil
gcaagtgaagagcagcaggta

SEQ ID NO: 879 - DNA, 24 bp, synthetic construct
  misc_feature 1..24: note = synthetic sequence
  source 1..24: mol_type = other DNA
  modified_base 11: mod_base = OTHER; note = uracil
  modified_base 18: mod_base = OTHER; note = uracil
ggacaaagaatctaccgtgcaagt

SEQ ID NO: 880 - DNA, 22 bp, synthetic construct
  misc_feature 1..22: note = synthetic sequence
  source 1..22: mol_type = other DNA
  modified_base 3: mod_base = OTHER; note = uracil
  modified_base 8: mod_base = OTHER; note = uracil
tctcatgtccagcaaagcagaa

SEQ ID NO: 881 - DNA, 24 bp, synthetic construct
  misc_feature 1..24: note = synthetic sequence
  source 1..24: mol_type = other DNA
  modified_base 10: mod_base = OTHER; note = uracil
  modified_base 19: mod_base = OTHER; note = uracil
cgacagaagtggaagtgctgaaaa

SEQ ID NO: 882 - DNA, 24 bp, synthetic construct
  misc_feature 1..24: note = synthetic sequence
  source 1..24: mol_type = other DNA
  modified_base 8: mod_base = OTHER; note = uracil
  modified_base 16: mod_base = OTHER; note = uracil
ctggatgtgagctgttaaaaggga

SEQ ID NO: 883 - DNA, 22 bp, synthetic construct
  misc_feature 1..22: note = synthetic sequence
  source 1..22: mol_type = other DNA
  modified_base 8: mod_base = OTHER; note = uracil
  modified_base 21: mod_base = OTHER; note = uracil
gccaccttcaaggaaaccagtt

SEQ ID NO: 884 - DNA, 27 bp, synthetic construct
  misc_feature 1..27: note = synthetic sequence
  source 1..27: mol_type = other DNA
  modified_base 9: mod_base = OTHER; note = uracil
  modified_base 21: mod_base = OTHER; note = uracil
cttgagtctagatttagggctgaaagt

SEQ ID NO: 885 - DNA, 22 bp, synthetic construct
  misc_feature 1..22: note = synthetic sequence
  source 1..22: mol_type = other DNA
  modified_base 11: mod_base = OTHER; note = uracil
  modified_base 18: mod_base = OTHER; note = uracil
gtggagaagctcattgctacga

SEQ ID NO: 886 - DNA, 20 bp, synthetic construct
  misc_feature 1..20: note = synthetic sequence
  source 1..20: mol_type = other DNA
  modified_base 11: mod_base = OTHER; note = uracil
  modified_base 18: mod_base = OTHER; note = uracil
gtatgtgccctgctccttcc

SEQ ID NO: 887 - DNA, 22 bp, synthetic construct
  misc_feature 1..22: note = synthetic sequence
  source 1..22: mol_type = other DNA
  modified_base 17: mod_base = OTHER; note = uracil
  modified_base 20: mod_base = OTHER; note = uracil
gcaccctgaggaatgcatgtat

SEQ ID NO: 888 - DNA, 19 bp, synthetic construct
  misc_feature 1..19: note = synthetic sequence
  source 1..19: mol_type = other DNA
  modified_base 4: mod_base = OTHER; note = uracil
  modified_base 18: mod_base = OTHER; note = uracil
gcctcaggaaggccctttc

SEQ ID NO: 889 - DNA, 19 bp, synthetic construct
  misc_feature 1..19: note = synthetic sequence
  source 1..19: mol_type = other DNA
  modified_base 10: mod_base = OTHER; note = uracil
  modified_base 17: mod_base = OTHER; note = uracil
gagtgactatgggcggtga

SEQ ID NO: 890 - DNA, 24 bp, synthetic construct
  misc_feature 1..24: note = synthetic sequence
  source 1..24: mol_type = other DNA
  modified_base 4: mod_base = OTHER; note = uracil
  modified_base 13: mod_base = OTHER; note = uracil
agatgatgctactggcaacagaac

SEQ ID NO: 891 - DNA, 23 bp, synthetic construct
  misc_feature 1..23: note = synthetic sequence
  source 1..23: mol_type = other DNA
  modified_base 11: mod_base = OTHER; note = uracil
  modified_base 22: mod_base = OTHER; note = uracil
ggaaacctcttcagcatttgctt

SEQ ID NO: 892 - DNA, 22 bp, synthetic construct
  misc_feature 1..22: note = synthetic sequence
  source 1..22: mol_type = other DNA
  modified_base 5: mod_base = OTHER; note = uracil
  modified_base 14: mod_base = OTHER; note = uracil
ggcatttcagctgtggaaggat

SEQ ID NO: 893 - DNA, 21 bp, synthetic construct
  misc_feature 1..21: note = synthetic sequence
  source 1..21: mol_type = other DNA
  modified_base 10: mod_base = OTHER; note = uracil
  modified_base 19: mod_base = OTHER; note = uracil
cggtcttcatgcagagactga

SEQ ID NO: 894 - DNA, 28 bp, synthetic construct
  misc_feature 1..28: note = synthetic sequence
  source 1..28: mol_type = other DNA
  modified_base 9: mod_base = OTHER; note = uracil
  modified_base 20: mod_base = OTHER; note = uracil
gtgaaatatagatgttccctccaggaat

SEQ ID NO: 895 - DNA, 23 bp, synthetic construct
  misc_feature 1..23: note = synthetic sequence
  source 1..23: mol_type = other DNA
  modified_base 15: mod_base = OTHER; note = uracil
  modified_base 20: mod_base = OTHER; note = uracil
ccagagcaggcagatgaaatacc

SEQ ID NO: 896 - DNA, 20 bp, synthetic construct
  misc_feature 1..20: note = synthetic sequence
  source 1..20: mol_type = other DNA
  modified_base 13: mod_base = OTHER; note = uracil
  modified_base 19: mod_base = OTHER; note = uracil
agctccacagcatcgatgtc

SEQ ID NO: 897 - DNA, 21 bp, synthetic construct
  misc_feature 1..21: note = synthetic sequence
  source 1..21: mol_type = other DNA
  modified_base 8: mod_base = OTHER; note = uracil
  modified_base 20: mod_base = OTHER; note = uracil
cgtctgctgaggctcaagtta

SEQ ID NO: 898 - DNA, 21 bp, synthetic construct
  misc_feature 1..21: note = synthetic sequence
  source 1..21: mol_type = other DNA
  modified_base 8: mod_base = OTHER; note = uracil
  modified_base 18: mod_base = OTHER; note = uracil
gcacaactccggtgacatcaa

SEQ ID NO: 899 - DNA, 21 bp, synthetic construct
  misc_feature 1..21: note = synthetic sequence
  source 1..21: mol_type = other DNA
  modified_base 4: mod_base = OTHER; note = uracil
  modified_base 14: mod_base = OTHER; note = uracil
tgatgcccaaagatggcaaga

SEQ ID NO: 900 - DNA, 21 bp, synthetic construct
  misc_feature 1..21: note = synthetic sequence
  source 1..21: mol_type = other DNA
  modified_base 9: mod_base = OTHER; note = uracil
  modified_base 18: mod_base = OTHER; note = uracil
cgctcttctctacgacctcca

SEQ ID NO: 901 - DNA, 20 bp, synthetic construct
  misc_feature 1..20: note = synthetic sequence
  source 1..20: mol_type = other DNA
  modified_base 8: mod_base = OTHER; note = uracil
  modified_base 17: mod_base = OTHER; note = uracil
ttctcggtctggaggatgga

SEQ ID NO: 902 - DNA, 23 bp, synthetic construct
  misc_feature 1..23: note = synthetic sequence
  source 1..23: mol_type = other DNA
  modified_base 12: mod_base = OTHER; note = uracil
  modified_base 21: mod_base = OTHER; note = uracil
cagctccagagtctctagactgt

SEQ ID NO: 903 - DNA, 18 bp, synthetic construct
  misc_feature 1..18: note = synthetic sequence
  source 1..18: mol_type = other DNA
  modified_base 10: mod_base = OTHER; note = uracil
  modified_base 17: mod_base = OTHER; note = uracil
aggactgcctgccccata

SEQ ID NO: 904 - DNA, 22 bp, synthetic construct
  misc_feature 1..22: note = synthetic sequence
  source 1..22: mol_type = other DNA
  modified_base 12: mod_base = OTHER; note = uracil
  modified_base 20: mod_base = OTHER; note = uracil
acattcctcgatgtccccttct

SEQ ID NO: 905 - DNA, 20 bp, synthetic construct
  misc_feature 1..20: note = synthetic sequence
  source 1..20: mol_type = other DNA
cctttgggcaaggacctgag

SEQ ID NO: 906 - DNA, 24 bp, synthetic construct
  misc_feature 1..24: note = synthetic sequence
  source 1..24: mol_type = other DNA
  modified_base 10: mod_base = OTHER; note = uracil
  modified_base 20: mod_base = OTHER; note = uracil
ccccacaacttgaagatgttccat

SEQ ID NO: 907 - DNA, 21 bp, synthetic construct
  misc_feature 1..21: note = synthetic sequence
  source 1..21: mol_type = other DNA
  modified_base 9: mod_base = OTHER; note = uracil
  modified_base 16: mod_base = OTHER; note = uracil
ggttgtgatcggcatcttggt

SEQ ID NO: 908 - DNA, 21 bp, synthetic construct
  misc_feature 1..21: note = synthetic sequence
  source 1..21: mol_type = other DNA
  modified_base 5: mod_base = OTHER; note = uracil
  modified_base 15: mod_base = OTHER; note = uracil
cccctgcaggatgttggaaat

SEQ ID NO: 909 - DNA, 24 bp, synthetic construct
  misc_feature 1..24: note = synthetic sequence
  source 1..24: mol_type = other DNA
  modified_base 9: mod_base = OTHER; note = uracil
  modified_base 21: mod_base = OTHER; note = uracil
ccgctgtgtaggaaagaagctaaa

SEQ ID NO: 910 - DNA, 19 bp, synthetic construct
  misc_feature 1..19: note = synthetic sequence
  source 1..19: mol_type = other DNA
  modified_base 10: mod_base = OTHER; note = uracil
  modified_base 18: mod_base = OTHER; note = uracil
acaaggttctggcgtggtc

SEQ ID NO: 911 - DNA, 18 bp, synthetic construct
  misc_feature 1..18: note = synthetic sequence
  source 1..18: mol_type = other DNA
  modified_base 3: mod_base = OTHER; note = uracil
  modified_base 17: mod_base = OTHER; note = uracil
gatcccgcacacccgata

SEQ ID NO: 912 - DNA, 25 bp, synthetic construct
  misc_feature 1..25: note = synthetic sequence
  source 1..25: mol_type = other DNA
  modified_base 12: mod_base = OTHER; note = uracil
  modified_base 17: mod_base = OTHER; note = uracil
aatagttcagctgcttcatgttcct

SEQ ID NO: 913 - DNA, 18 bp, synthetic construct
  misc_feature 1..18: note = synthetic sequence
  source 1..18: mol_type = other DNA
  modified_base 8: mod_base = OTHER; note = uracil
  modified_base 17: mod_base = OTHER; note = uracil
gccccattgttcccggtt

SEQ ID NO: 914 - DNA, 18 bp, synthetic construct
  misc_feature 1..18: note = synthetic sequence
  source 1..18: mol_type = other DNA
  modified_base 6: mod_base = OTHER; note = uracil
  modified_base 16: mod_base = OTHER; note = uracil
ggcactgcccacaagtca

SEQ ID NO: 915 - DNA, 20 bp, synthetic construct
  misc_feature 1..20: note = synthetic sequence
  source 1..20: mol_type = other DNA
  modified_base 12: mod_base = OTHER; note = uracil
  modified_base 17: mod_base = OTHER; note = uracil
tctcggccacctttgatgag

SEQ ID NO: 916 - DNA, 26 bp, synthetic construct
  misc_feature 1..26: note = synthetic sequence
  source 1..26: mol_type = other DNA
  modified_base 14: mod_base = OTHER; note = uracil
  modified_base 24: mod_base = OTHER; note = uracil
atttgagctcagatgttcttcactgt

SEQ ID NO: 917 - DNA, 22 bp, synthetic construct
  misc_feature 1..22: note = synthetic sequence
  source 1..22: mol_type = other DNA
  modified_base 10: mod_base = OTHER; note = uracil
  modified_base 21: mod_base = OTHER; note = uracil
gcctgtgtctccttgtgatgtt

SEQ ID NO: 918 - DNA, 22 bp, synthetic construct
  misc_feature 1..22: note = synthetic sequence
  source 1..22: mol_type = other DNA
  modified_base 10: mod_base = OTHER; note = uracil
  modified_base 21: mod_base = OTHER; note = uracil
gcctgtgtctccttgtgatgtt

SEQ ID NO: 919 - DNA, 22 bp, synthetic construct
  misc_feature 1..22: note = synthetic sequence
  source 1..22: mol_type = other DNA
  modified_base 9: mod_base = OTHER; note = uracil
  modified_base 18: mod_base = OTHER; note = uracil
gcagcacttcaggaggttacat

SEQ ID NO: 920 - DNA, 20 bp, synthetic construct
  misc_feature 1..20: note = synthetic sequence
  source 1..20: mol_type = other DNA
  modified_base 8: mod_base = OTHER; note = uracil
  modified_base 17: mod_base = OTHER; note = uracil
tggttgctgtctcagttgct

SEQ ID NO: 921 - DNA, 21 bp, synthetic construct
  misc_feature 1..21: note = synthetic sequence
  source 1..21: mol_type = other DNA
  modified_base 7: mod_base = OTHER; note = uracil
  modified_base 19: mod_base = OTHER; note = uracil
ccagggtgccaggatcattac

SEQ ID NO: 922 - DNA, 22 bp, synthetic construct
  misc_feature 1..22: note = synthetic sequence
  source 1..22: mol_type = other DNA
  modified_base 9: mod_base = OTHER; note = uracil
  modified_base 19: mod_base = OTHER; note = uracil
tccaaagctccaaaggtttcct

SEQ ID NO: 923 - DNA, 20 bp, synthetic construct
  misc_feature 1..20: note = synthetic sequence
  source 1..20: mol_type = other DNA
  modified_base 2: mod_base = OTHER; note = uracil
  modified_base 10: mod_base = OTHER; note = uracil
ctgtgattctgcccacggaa

SEQ ID NO: 924 - DNA, 23 bp, synthetic construct
  misc_feature 1..23: note = synthetic sequence
  source 1..23: mol_type = other DNA
  modified_base 11: mod_base = OTHER; note = uracil
  modified_base 22: mod_base = OTHER; note = uracil
ccaatgtgagtcctcagccaatc

SEQ ID NO: 925 - DNA, 25 bp, synthetic construct
  misc_feature 1..25: note = synthetic sequence
  source 1..25: mol_type = other DNA
  modified_base 8: mod_base = OTHER; note = uracil
  modified_base 18: mod_base = OTHER; note = uracil
gacagactgaagaaacatccaaggt

SEQ ID NO: 926 - DNA, 19 bp, synthetic construct
  misc_feature 1..19: note = synthetic sequence
  source 1..19: mol_type = other DNA
  modified_base 14: mod_base = OTHER; note = uracil
  modified_base 18: mod_base = OTHER; note = uracil
tttccaggcaccgttcctc

SEQ ID NO: 927 - DNA, 20 bp, synthetic construct
  misc_feature 1..20: note = synthetic sequence
  source 1..20: mol_type = other DNA
  modified_base 9: mod_base = OTHER; note = uracil
  modified_base 18: mod_base = OTHER; note = uracil
gacaagcctgtagcccatgt

SEQ ID NO: 928 - DNA, 21 bp, synthetic construct
  misc_feature 1..21: note = synthetic sequence
  source 1..21: mol_type = other DNA
  modified_base 7: mod_base = OTHER; note = uracil
  modified_base 18: mod_base = OTHER; note = uracil
atgaggtacaggccctctgat

SEQ ID NO: 929 - DNA, 20 bp, synthetic construct
  misc_feature 1..20: note = synthetic sequence
  source 1..20: mol_type = other DNA
  modified_base 5: mod_base = OTHER; note = uracil
  modified_base 17: mod_base = OTHER; note = uracil
ctcttggcagccttcctgat

SEQ ID NO: 930 - DNA, 25 bp, synthetic construct
  misc_feature 1..25: note = synthetic sequence
  source 1..25: mol_type = other DNA
  modified_base 12: mod_base = OTHER; note = uracil
  modified_base 23: mod_base = OTHER; note = uracil
tccactctcaatcactctcagttct

SEQ ID NO: 931 - DNA, 23 bp, synthetic construct
  misc_feature 1..23: note = synthetic sequence
  source 1..23: mol_type = other DNA
  modified_base 12: mod_base = OTHER; note = uracil
  modified_base 22: mod_base = OTHER; note = uracil
gaggccagcagtaaaacaacatc

SEQ ID NO: 932 - DNA, 27 bp, synthetic construct
  misc_feature 1..27: note = synthetic sequence
  source 1..27: mol_type = other DNA
  modified_base 13: mod_base = OTHER; note = uracil
  modified_base 26: mod_base = OTHER; note = uracil
acagaaggtgacttgggcatagatata

SEQ ID NO: 933 - DNA, 20 bp, synthetic construct
  misc_feature 1..20: note = synthetic sequence
  source 1..20: mol_type = other DNA
  modified_base 12: mod_base = OTHER; note = uracil
  modified_base 19: mod_base = OTHER; note = uracil
ccccgcgggactcatatttt

SEQ ID NO: 934 - DNA, 21 bp, synthetic construct
  misc_feature 1..21: note = synthetic sequence
  source 1..21: mol_type = other DNA
  modified_base 11: mod_base = OTHER; note = uracil
  modified_base 19: mod_base = OTHER; note = uracil
gacacagcggtgctgaaatac

SEQ ID NO: 935 - DNA, 20 bp, synthetic construct
  misc_feature 1..20: note = synthetic sequence
  source 1..20: mol_type = other DNA
  modified_base 5: mod_base = OTHER; note = uracil
  modified_base 18: mod_base = OTHER; note = uracil
gagatggcacgggacactac

SEQ ID NO: 936 - DNA, 21 bp, synthetic construct
  misc_feature 1..21: note = synthetic sequence
  source 1..21: mol_type = other DNA
  modified_base 9: mod_base = OTHER; note = uracil
  modified_base 20: mod_base = OTHER; note = uracil
ggttgtggtggtctgacagtt

SEQ ID NO: 937 - DNA, 20 bp, synthetic construct
  misc_feature 1..20: note = synthetic sequence
  source 1..20: mol_type = other DNA
  modified_base 14: mod_base = OTHER; note = uracil
  modified_base 18: mod_base = OTHER; note = uracil
gtccagggcaaggtctttga

SEQ ID NO: 938 - DNA, 26 bp, synthetic construct
  misc_feature 1..26: note = synthetic sequence
  source 1..26: mol_type = other DNA
  modified_base 13: mod_base = OTHER; note = uracil
  modified_base 25: mod_base = OTHER; note = uracil
cattgtagtttgtagctcgtgtgttg

SEQ ID NO: 939 - DNA, 24 bp, synthetic construct
  misc_feature 1..24: note = synthetic sequence
  source 1..24: mol_type = other DNA
  modified_base 13: mod_base = OTHER; note = uracil
  modified_base 21: mod_base = OTHER; note = uracil
ggaagaaggccctacagtattgag

SEQ ID NO: 940 - DNA, 22 bp, synthetic construct
  misc_feature 1..22: note = synthetic sequence
  source 1..22: mol_type = other DNA
  modified_base 11: mod_base = OTHER; note = uracil
  modified_base 20: mod_base = OTHER; note = uracil
cccacagaccttggattcttca

SEQ ID NO: 941 - DNA, 22 bp, synthetic construct
  misc_feature 1..22: note = synthetic sequence
  source 1..22: mol_type = other DNA
  modified_base 10: mod_base = OTHER; note = uracil
  modified_base 21: mod_base = OTHER; note = uracil
ccagacccctcgaagttctttt

SEQ ID NO: 942 - DNA, 20 bp, synthetic construct
  misc_feature 1..20: note = synthetic sequence
  source 1..20: mol_type = other DNA
  modified_base 9: mod_base = OTHER; note = uracil
  modified_base 19: mod_base = OTHER; note = uracil
cttgtccctctccagcactt

SEQ ID NO: 943 - DNA, 20 bp, synthetic construct
  misc_feature 1..20: note = synthetic sequence
  source 1..20: mol_type = other DNA
  modified_base 7: mod_base = OTHER; note = uracil
  modified_base 14: mod_base = OTHER; note = uracil
ttcgtctgcacagtcaccaa

SEQ ID NO: 944 - DNA, 20 bp, synthetic construct
  misc_feature 1..20: note = synthetic sequence
  source 1..20: mol_type = other DNA
  modified_base 13: mod_base = OTHER; note = uracil
  modified_base 19: mod_base = OTHER; note = uracil
cagccacagcagtagcaatg

SEQ ID NO: 945 - DNA, 20 bp, synthetic construct
  misc_feature 1..20: note = synthetic sequence
  source 1..20: mol_type = other DNA
  modified_base 10: mod_base = OTHER; note = uracil
  modified_base 12: mod_base = OTHER; note = uracil
gggagaggctctaccaggaa

SEQ ID NO: 946 - DNA, 22 bp, synthetic construct
  misc_feature 1..22: note = synthetic sequence
  source 1..22: mol_type = other DNA
  modified_base 11: mod_base = OTHER; note = uracil
  modified_base 21: mod_base = OTHER; note = uracil
gtgggtccactgagtcattgta

SEQ ID NO: 947 - DNA, 28 bp, synthetic construct
  misc_feature 1..28: note = synthetic sequence
  source 1..28: mol_type = other DNA
  modified_base 10: mod_base = OTHER; note = uracil
  modified_base 24: mod_base = OTHER; note = uracil
ttctacctctagatctgtttggttcagt

SEQ ID NO: 948 - DNA, 21 bp, synthetic construct
  misc_feature 1..21: note = synthetic sequence
  source 1..21: mol_type = other DNA
  modified_base 10: mod_base = OTHER; note = uracil
  modified_base 19: mod_base = OTHER; note = uracil
aacgagatgtggacagcatgt

SEQ ID NO: 949 - DNA, 21 bp, synthetic construct
  misc_feature 1..21: note = synthetic sequence
  source 1..21: mol_type = other DNA
  modified_base 5: mod_base = OTHER; note = uracil
  modified_base 16: mod_base = OTHER; note = uracil
gtggtccaccccaactaaaga

SEQ ID NO: 950 - DNA, 24 bp, synthetic construct
  misc_feature 1..24: note = synthetic sequence
  source 1..24: mol_type = other DNA
  modified_base 11: mod_base = OTHER; note = uracil
  modified_base 20: mod_base = OTHER; note = uracil
acagacttccttttggccatacaa

SEQ ID NO: 951 - DNA, 20 bp, synthetic construct
  misc_feature 1..20: note = synthetic sequence
  source 1..20: mol_type = other DNA
  modified_base 8: mod_base = OTHER; note = uracil
  modified_base 19: mod_base = OTHER; note = uracil
tcgccattgaccgctacatt

SEQ ID NO: 952 - DNA, 22 bp, synthetic construct
  misc_feature 1..22: note = synthetic sequence
  source 1..22: mol_type = other DNA
  modified_base 7: mod_base = OTHER; note = uracil
  modified_base 19: mod_base = OTHER; note = uracil
agttgttccaacctagcatggg

SEQ ID NO: 953 - DNA, 19 bp, synthetic construct
  misc_feature 1..19: note = synthetic sequence
  source 1..19: mol_type = other DNA
  modified_base 5: mod_base = OTHER; note = uracil
  modified_base 14: mod_base = OTHER; note = uracil
cgcctccaccaactcagat

SEQ ID NO: 954 - DNA, 20 bp, synthetic construct
  misc_feature 1..20: note = synthetic sequence
  source 1..20: mol_type = other DNA
  modified_base 6: mod_base = OTHER; note = uracil
  modified_base 19: mod_base = OTHER; note = uracil
ggtcgtccaggtaccctttg

SEQ ID NO: 955 - DNA, 21 bp, synthetic construct
  misc_feature 1..21: note = synthetic sequence
  source 1..21: mol_type = other DNA
  modified_base 10: mod_base = OTHER; note = uracil
  modified_base 20: mod_base = OTHER; note = uracil
tgtggcctatgcagtcaactc

SEQ ID NO: 956 - DNA, 24 bp, synthetic construct
  misc_feature 1..24: note = synthetic sequence
  source 1..24: mol_type = other DNA
  modified_base 7: mod_base = OTHER; note = uracil
  modified_base 16: mod_base = OTHER; note = uracil
gtgaactgcatctggtagagaaca

SEQ ID NO: 957 - DNA, 26 bp, synthetic construct
  misc_feature 1..26: note = synthetic sequence
  source 1..26: mol_type = other DNA
  modified_base 17: mod_base = OTHER; note = uracil
  modified_base 25: mod_base = OTHER; note = uracil
ttgcaaagaaggaagatggttgtttc

SEQ ID NO: 958 - DNA, 20 bp, synthetic construct
  misc_feature 1..20: note = synthetic sequence
  source 1..20: mol_type = other DNA
  modified_base 9: mod_base = OTHER; note = uracil
  modified_base 18: mod_base = OTHER; note = uracil
atactggctgcacaggttgt

SEQ ID NO: 959 - DNA, 20 bp, synthetic construct
  misc_feature 1..20: note = synthetic sequence
  source 1..20: mol_type = other DNA
  modified_base 8: mod_base = OTHER; note = uracil
  modified_base 17: mod_base = OTHER; note = uracil
gtgaccgtgatgctggtgat

SEQ ID NO: 960 - DNA, 25 bp, synthetic construct
  misc_feature 1..25: note = synthetic sequence
  source 1..25: mol_type = other DNA
  modified_base 5: mod_base = OTHER; note = uracil
  modified_base 17: mod_base = OTHER; note = uracil
cggttatagatgtatctggccacac

SEQ ID NO: 961 - DNA, 23 bp, synthetic construct
  misc_feature 1..23: note = synthetic sequence
  source 1..23: mol_type = other DNA
  modified_base 11: mod_base = OTHER; note = uracil
  modified_base 22: mod_base = OTHER; note = uracil
ctgctcagtgtgatccttgcata

SEQ ID NO: 962 - DNA, 19 bp, synthetic construct
  misc_feature 1..19: note = synthetic sequence
  source 1..19: mol_type = other DNA
  modified_base 4: mod_base = OTHER; note = uracil
  modified_base 18: mod_base = OTHER; note = uracil
cattgcgacaggcacactc

SEQ ID NO: 963 - DNA, 19 bp, synthetic construct
  misc_feature 1..19: note = synthetic sequence
  source 1..19: mol_type = other DNA
  modified_base 5: mod_base = OTHER; note = uracil
  modified_base 18: mod_base = OTHER; note = uracil
ctgctggcacaaggcaatg

SEQ ID NO: 964 - DNA, 20 bp, synthetic construct
  misc_feature 1..20: note = synthetic sequence
  source 1..20: mol_type = other DNA
  modified_base 7: mod_base = OTHER; note = uracil
  modified_base 18: mod_base = OTHER; note = uracil
tcatgctgggcttcgagtag

SEQ ID NO: 965 - DNA, 19 bp, synthetic construct
  misc_feature 1..19: note = synthetic sequence
  source 1..19: mol_type = other DNA
  modified_base 11: mod_base = OTHER; note = uracil
  modified_base 18: mod_base = OTHER; note = uracil
cgtcagcggctttctccta

SEQ ID NO: 966 - DNA, 23 bp, synthetic construct
  misc_feature 1..23: note = synthetic sequence
  source 1..23: mol_type = other DNA
  modified_base 5: mod_base = OTHER; note = uracil
  modified_base 14: mod_base = OTHER; note = uracil
ttgatccacctgctccaaaaact

SEQ ID NO: 967 - DNA, 20 bp, synthetic construct
  misc_feature 1..20: note = synthetic sequence
  source 1..20: mol_type = other DNA
  modified_base 8: mod_base = OTHER; note = uracil
  modified_base 19: mod_base = OTHER; note = uracil
cgggaggtcaccctacactt

SEQ ID NO: 968 - DNA, 19 bp, synthetic construct
  misc_feature 1..19: note = synthetic sequence
  source 1..19: mol_type = other DNA
  modified_base 7: mod_base = OTHER; note = uracil
  modified_base 16: mod_base = OTHER; note = uracil
gggatgtccaggtcttcgg

SEQ ID NO: 969 - DNA, 22 bp, synthetic construct
  misc_feature 1..22: note = synthetic sequence
  source 1..22: mol_type = other DNA
  modified_base 13: mod_base = OTHER; note = uracil
  modified_base 21: mod_base = OTHER; note = uracil
ctacagacccagtttccccatt

SEQ ID NO: 970 - DNA, 21 bp, synthetic construct
  misc_feature 1..21: note = synthetic sequence
  source 1..21: mol_type = other DNA
  modified_base 7: mod_base = OTHER; note = uracil
  modified_base 20: mod_base = OTHER; note = uracil
aagggctcagagtggttgttt

SEQ ID NO: 971 - DNA, 23 bp, synthetic construct
  misc_feature 1..23: note = synthetic sequence
  source 1..23: mol_type = other DNA
  modified_base 5: mod_base = OTHER; note = uracil
  modified_base 16: mod_base = OTHER; note = uracil
ctgctgcaaatgtggtgagaaat

SEQ ID NO: 972 - DNA, 20 bp, synthetic construct
  misc_feature 1..20: note = synthetic sequence
  source 1..20: mol_type = other DNA
  modified_base 7: mod_base = OTHER; note = uracil
  modified_base 18: mod_base = OTHER; note = uracil
caccaatggcaaaaggctgt

SEQ ID NO: 973 - DNA, 22 bp, synthetic construct
  misc_feature 1..22: note = synthetic sequence
  source 1..22: mol_type = other DNA
  modified_base 14: mod_base = OTHER; note = uracil
  modified_base 20: mod_base = OTHER; note = uracil
gaaagccacaccctgaatctca

SEQ ID NO: 974 - DNA, 22 bp, synthetic construct
  misc_feature 1..22: note = synthetic sequence
  source 1..22: mol_type = other DNA
  modified_base 8: mod_base = OTHER; note = uracil
  modified_base 17: mod_base = OTHER; note = uracil
tccttcctctttctcctccaca

SEQ ID NO: 975 - DNA, 20 bp, synthetic construct
  misc_feature 1..20: note = synthetic sequence
  source 1..20: mol_type = other DNA
  modified_base 11: mod_base = OTHER; note = uracil
  modified_base 17: mod_base = OTHER; note = uracil
gaaccagcggttaccatgga

SEQ ID NO: 976 - DNA, 22 bp, synthetic construct
  misc_feature 1..22: note = synthetic sequence
  source 1..22: mol_type = other DNA
  modified_base 9: mod_base = OTHER; note = uracil
  modified_base 21: mod_base = OTHER; note = uracil
gtagatggtgggcaggaagatt

SEQ ID NO: 977 - DNA, 27 bp, synthetic construct
  misc_feature 1..27: note = synthetic sequence
  source 1..27: mol_type = other DNA
  modified_base 15: mod_base = OTHER; note = uracil
  modified_base 24: mod_base = OTHER; note = uracil
gattccagccaggatacagatcttaaa

SEQ ID NO: 978 - DNA, 22 bp, synthetic construct
  misc_feature 1..22: note = synthetic sequence
  source 1..22: mol_type = other DNA
  modified_base 13: mod_base = OTHER; note = uracil
  modified_base 19: mod_base = OTHER; note = uracil
ggctcaaaggagtcaaagtgga

SEQ ID NO: 979 - DNA, 21 bp, synthetic construct
  misc_feature 1..21: note = synthetic sequence
  source 1..21: mol_type = other DNA
  modified_base 12: mod_base = OTHER; note = uracil
  modified_base 19: mod_base = OTHER; note = uracil
cagtactgccctgacccttac

SEQ ID NO: 980 - DNA, 26 bp, synthetic construct
  misc_feature 1..26: note = synthetic sequence
  source 1..26: mol_type = other DNA
  modified_base 12: mod_base = OTHER; note = uracil
  modified_base 17: mod_base = OTHER; note = uracil
aaaatcccagatatgctggaaaacct

SEQ ID NO: 981 - DNA, 20 bp, synthetic construct
  misc_feature 1..20: note = synthetic sequence
  source 1..20: mol_type = other DNA
  modified_base 7: mod_base = OTHER; note = uracil
  modified_base 19: mod_base = OTHER; note = uracil
gccaggtgacaggaaccttt

SEQ ID NO: 982 - DNA, 21 bp, synthetic construct
  misc_feature 1..21: note = synthetic sequence
  source 1..21: mol_type = other DNA
  modified_base 10: mod_base = OTHER; note = uracil
  modified_base 18: mod_base = OTHER; note = uracil
tcacgaggatttcccggtagt

SEQ ID NO: 983 - DNA, 21 bp, synthetic construct
  misc_feature 1..21: note = synthetic sequence
  source 1..21: mol_type = other DNA
  modified_base 10: mod_base = OTHER; note = uracil
  modified_base 20: mod_base = OTHER; note = uracil
cccggcagattccacagaatt

SEQ ID NO: 984 - DNA, 23 bp, synthetic construct
  misc_feature 1..23: note = synthetic sequence
  source 1..23: mol_type = other DNA
  modified_base 9: mod_base = OTHER; note = uracil
  modified_base 20: mod_base = OTHER; note = uracil
caggtcgctgacatatttctgga

SEQ ID NO: 985 - DNA, 28 bp, synthetic construct
  misc_feature 1..28: note = synthetic sequence
  source 1..28: mol_type = other DNA
  modified_base 7: mod_base = OTHER; note = uracil
  modified_base 25: mod_base = OTHER; note = uracil
gcagattccacaaaagttcatagttgac

SEQ ID NO: 986 - DNA, 24 bp, synthetic construct
  misc_feature 1..24: note = synthetic sequence
  source 1..24: mol_type = other DNA
  modified_base 10: mod_base = OTHER; note = uracil
  modified_base 23: mod_base = OTHER; note = uracil
agcttcaggtcgctgatgtatttc

SEQ ID NO: 987 - DNA, 23 bp, synthetic construct
  misc_feature 1..23: note = synthetic sequence
  source 1..23: mol_type = other DNA
  modified_base 7: mod_base = OTHER; note = uracil
  modified_base 18: mod_base = OTHER; note = uracil
agccaatgactttgtggtgacat

SEQ ID NO: 988 - DNA, 20 bp, synthetic construct
  misc_feature 1..20: note = synthetic sequence
  source 1..20: mol_type = other DNA
  modified_base 9: mod_base = OTHER; note = uracil
  modified_base 18: mod_base = OTHER; note = uracil
tgcaggagtgtcagctttgt

SEQ ID NO: 989 - DNA, 20 bp, synthetic construct
  misc_feature 1..20: note = synthetic sequence
  source 1..20: mol_type = other DNA
  modified_base 6: mod_base = OTHER; note = uracil
  modified_base 14: mod_base = OTHER; note = uracil
gacactctggacttcagcca

SEQ ID NO: 990 - DNA, 21 bp, synthetic construct
  misc_feature 1..21: note = synthetic sequence
  source 1..21: mol_type = other DNA
  modified_base 6: mod_base = OTHER; note = uracil
  modified_base 19: mod_base = OTHER; note = uracil
ggtcctgagaaagccctctct

SEQ ID NO: 991 - DNA, 20 bp, synthetic construct
  misc_feature 1..20: note = synthetic sequence
  source 1..20: mol_type = other DNA
  modified_base 3: mod_base = OTHER; note = uracil
  modified_base 18: mod_base = OTHER; note = uracil
cctgccacgccaataactca

SEQ ID NO: 992 - DNA, 22 bp, synthetic construct
  misc_feature 1..22: note = synthetic sequence
  source 1..22: mol_type = other DNA
  modified_base 10: mod_base = OTHER; note = uracil
  modified_base 21: mod_base = OTHER; note = uracil
aggtcaggttcacagagtcctt

SEQ ID NO: 993 - DNA, 22 bp, synthetic construct
  misc_feature 1..22: note = synthetic sequence
  source 1..22: mol_type = other DNA
  modified_base 8: mod_base = OTHER; note = uracil
  modified_base 18: mod_base = OTHER; note = uracil
tccagaatcgaaggccatcaag

SEQ ID NO: 994 - DNA, 22 bp, synthetic construct
  misc_feature 1..22: note = synthetic sequence
  source 1..22: mol_type = other DNA
  modified_base 3: mod_base = OTHER; note = uracil
  modified_base 14: mod_base = OTHER; note = uracil
tgtagggaagtgatgggagagg

SEQ ID NO: 995 - DNA, 24 bp, synthetic construct
  misc_feature 1..24: note = synthetic sequence
  source 1..24: mol_type = other DNA
  modified_base 6: mod_base = OTHER; note = uracil
  modified_base 16: mod_base = OTHER; note = uracil
cgagctatagaagaatcaccagca

SEQ ID NO: 996 - DNA, 22 bp, synthetic construct
  misc_feature 1..22: note = synthetic sequence
  source 1..22: mol_type = other DNA
  modified_base 10: mod_base = OTHER; note = uracil
  modified_base 21: mod_base = OTHER; note = uracil
tcttcggagtttgggtttgctt

SEQ ID NO: 997 - DNA, 26 bp, synthetic construct
  misc_feature 1..26: note = synthetic sequence
  source 1..26: mol_type = other DNA
  modified_base 5: mod_base = OTHER; note = uracil
  modified_base 20: mod_base = OTHER; note = uracil
gcaatccagacagtaattctgcaaac

SEQ ID NO: 998 - DNA, 26 bp, synthetic construct
  misc_feature 1..26: note = synthetic sequence
  source 1..26: mol_type = other DNA
  modified_base 13: mod_base = OTHER; note = uracil
  modified_base 24: mod_base = OTHER; note = uracil
aaagtgggaagatacgattcaagtcc

SEQ ID NO: 999 - DNA, 21 bp, synthetic construct
  misc_feature 1..21: note = synthetic sequence
  source 1..21: mol_type = other DNA
  modified_base 4: mod_base = OTHER; note = uracil
  modified_base 16: mod_base = OTHER; note = uracil
cactgccccgtcttatggaaa

SEQ ID NO: 1000 - DNA, 25 bp, synthetic construct
  misc_feature 1..25: note = synthetic sequence
  source 1..25: mol_type = other DNA
  modified_base 10: mod_base = OTHER; note = uracil
  modified_base 19: mod_base = OTHER; note = uracil
aggttggagtcgttctcatagaact

SEQ ID NO: 1001 - DNA, 27 bp, synthetic construct
  misc_feature 1..27: note = synthetic sequence
  source 1..27: mol_type = other DNA
  modified_base 13: mod_base = OTHER; note = uracil
  modified_base 26: mod_base = OTHER; note = uracil
cctctactaccttatggacctgtctta

SEQ ID NO: 1002 - DNA, 25 bp, synthetic construct
  misc_feature 1..25: note = synthetic sequence
  source 1..25: mol_type = other DNA
  modified_base 11: mod_base = OTHER; note = uracil
  modified_base 24: mod_base = OTHER; note = uracil
ggcatcacagtcttttccacaaatg

SEQ ID NO: 1003 - DNA, 23 bp, synthetic construct
  misc_feature 1..23: note = synthetic sequence
  source 1..23: mol_type = other DNA
  modified_base 13: mod_base = OTHER; note = uracil
  modified_base 22: mod_base = OTHER; note = uracil
ggcttcatagcattcgcctactc

SEQ ID NO: 1004 - DNA, 25 bp, synthetic construct
  misc_feature 1..25: note = synthetic sequence
  source 1..25: mol_type = other DNA
  modified_base 8: mod_base = OTHER; note = uracil
  modified_base 19: mod_base = OTHER; note = uracil
ggatgaatccaatggtcatgaggat

SEQ ID NO: 1005 - DNA, 22 bp, synthetic construct
  misc_feature 1..22: note = synthetic sequence
  source 1..22: mol_type = other DNA
  modified_base 2: mod_base = OTHER; note = uracil
  modified_base 10: mod_base = OTHER; note = uracil
ctccaagactggcaagaaagga

SEQ ID NO: 1006 - DNA, 21 bp, synthetic construct
  misc_feature 1..21: note = synthetic sequence
  source 1..21: mol_type = other DNA
  modified_base 10: mod_base = OTHER; note = uracil
  modified_base 19: mod_base = OTHER; note = uracil
gcatcttgggttcaggcttca

SEQ ID NO: 1007 - DNA, 26 bp, synthetic construct
  misc_feature 1..26: note = synthetic sequence
  source 1..26: mol_type = other DNA
  modified_base 15: mod_base = OTHER; note = uracil
  modified_base 24: mod_base = OTHER; note = uracil
gtttatggagcaggtggaagatctat

SEQ ID NO: 1008 - DNA, 19 bp, synthetic construct
  misc_feature 1..19: note = synthetic sequence
  source 1..19: mol_type = other DNA
  modified_base 9: mod_base = OTHER; note = uracil
  modified_base 15: mod_base = OTHER; note = uracil
tcgtgcaatctgcgtacca

SEQ ID NO: 1009 - DNA, 20 bp, synthetic construct
  misc_feature 1..20: note = synthetic sequence
  source 1..20: mol_type = other DNA
  modified_base 6: mod_base = OTHER; note = uracil
  modified_base 18: mod_base = OTHER; note = uracil
cgaggtggagcacatgttca

SEQ ID NO: 1010 - DNA, 20 bp, synthetic construct
  misc_feature 1..20: note = synthetic sequence
  source 1..20: mol_type = other DNA
  modified_base 3: mod_base = OTHER; note = uracil
  modified_base 19: mod_base = OTHER; note = uracil
ggtccccagaacggatcttt

SEQ ID NO: 1011 - DNA, 19 bp, synthetic construct
  misc_feature 1..19: note = synthetic sequence
  source 1..19: mol_type = other DNA
  modified_base 8: mod_base = OTHER; note = uracil
  modified_base 17: mod_base = OTHER; note = uracil
ggctgtctcgaacgtgtga

SEQ ID NO: 1012 - DNA, 28 bp, synthetic construct
  misc_feature 1..28: note = synthetic sequence
  source 1..28: mol_type = other DNA
  modified_base 17: mod_base = OTHER; note = uracil
  modified_base 26: mod_base = OTHER; note = uracil
aaccatcaaacagaaataccaggtctac

SEQ ID NO: 1013 - DNA, 24 bp, synthetic construct
  misc_feature 1..24: note = synthetic sequence
  source 1..24: mol_type = other DNA
  modified_base 9: mod_base = OTHER; note = uracil
  modified_base 23: mod_base = OTHER; note = uracil
atgtcaaatgacagcaaagcactg

SEQ ID NO: 1014 - DNA, 24 bp, synthetic construct
  misc_feature 1..24: note = synthetic sequence
  source 1..24: mol_type = other DNA
  modified_base 11: mod_base = OTHER; note = uracil
  modified_base 22: mod_base = OTHER; note = uracil
caacttgtcctccttgtgaaatgg

SEQ ID NO: 1015 - DNA, 21 bp, synthetic construct
  misc_feature 1..21: note = synthetic sequence
  source 1..21: mol_type = other DNA
  modified_base 7: mod_base = OTHER; note = uracil
  modified_base 19: mod_base = OTHER; note = uracil
ctgctgtcaggtctccaatga

SEQ ID NO: 1016 - DNA, 22 bp, synthetic construct
  misc_feature 1..22: note = synthetic sequence
  source 1..22: mol_type = other DNA
  modified_base 6: mod_base = OTHER; note = uracil
  modified_base 11: mod_base = OTHER; note = uracil
gccagtgacatgcaaagaaact

SEQ ID NO: 1017 - DNA, 21 bp, synthetic construct
  misc_feature 1..21: note = synthetic sequence
  source 1..21: mol_type = other DNA
  modified_base 10: mod_base = OTHER; note = uracil
  modified_base 13: mod_base = OTHER; note = uracil
ctgaagacgtggtaccagaca

SEQ ID NO: 1018 - DNA, 23 bp, synthetic construct
  misc_feature 1..23: note = synthetic sequence
  source 1..23: mol_type = other DNA
  modified_base 12: mod_base = OTHER; note = uracil
  modified_base 22: mod_base = OTHER; note = uracil
gcttcaagacctctcaaggcttt

SEQ ID NO: 1019 - DNA, 23 bp, synthetic construct
  misc_feature 1..23: note = synthetic sequence
  source 1..23: mol_type = other DNA
  modified_base 13: mod_base = OTHER; note = uracil
  modified_base 20: mod_base = OTHER; note = uracil
ctgaactgcagatccttggtgaa

SEQ ID NO: 1020 - DNA, 21 bp, synthetic construct
  misc_feature 1..21: note = synthetic sequence
  source 1..21: mol_type = other DNA
  modified_base 10: mod_base = OTHER; note = uracil
  modified_base 19: mod_base = OTHER; note = uracil
caccaacgctgcctttaatga

SEQ ID NO: 1021 - DNA, 21 bp, synthetic construct
  misc_feature 1..21: note = synthetic sequence
  source 1..21: mol_type = other DNA
  modified_base 13: mod_base = OTHER; note = uracil
  modified_base 20: mod_base = OTHER; note = uracil
gaaagcaaaggctcagcagtt

SEQ ID NO: 1022 - DNA, 28 bp, synthetic construct
  misc_feature 1..28: note = synthetic sequence
  source 1..28: mol_type = other DNA
  modified_base 10: mod_base = OTHER; note = uracil
  modified_base 20: mod_base = OTHER; note = uracil
tgtagttggtcacttcacataaggaaat

SEQ ID NO: 1023 - DNA, 22 bp, synthetic construct
  misc_feature 1..22: note = synthetic sequence
  source 1..22: mol_type = other DNA
  modified_base 8: mod_base = OTHER; note = uracil
  modified_base 20: mod_base = OTHER; note = uracil
gtggctctccttgtcattttcc

SEQ ID NO: 1024 - DNA, 23 bp, synthetic construct
  misc_feature 1..23: note = synthetic sequence
  source 1..23: mol_type = other DNA
  modified_base 15: mod_base = OTHER; note = uracil
  modified_base 22: mod_base = OTHER; note = uracil
gggaggaaccaggctttaaagtt

SEQ ID NO: 1025 - DNA, 27 bp, synthetic construct
  misc_feature 1..27: note = synthetic sequence
  source 1..27: mol_type = other DNA
  modified_base 11: mod_base = OTHER; note = uracil
  modified_base 25: mod_base = OTHER; note = uracil
ccttggtgattctaatagtccttgtgt

SEQ ID NO: 1026 - DNA, 19 bp, synthetic construct
  misc_feature 1..19: note = synthetic sequence
  source 1..19: mol_type = other DNA
  modified_base 9: mod_base = OTHER; note = uracil
  modified_base 18: mod_base = OTHER; note = uracil
cgacgggatggcatcacta

SEQ ID NO: 1027 - DNA, 19 bp, synthetic construct
  misc_feature 1..19: note = synthetic sequence
  source 1..19: mol_type = other DNA
  modified_base 6: mod_base = OTHER; note = uracil
  modified_base 18: mod_base = OTHER; note = uracil
gcgcgtgcttttgtttgtg

SEQ ID NO: 1028 - DNA, 24 bp, synthetic construct
  misc_feature 1..24: note = synthetic sequence
  source 1..24: mol_type = other DNA
  modified_base 11: mod_base = OTHER; note = uracil
  modified_base 21: mod_base = OTHER; note = uracil
cagatggatatatgccacgctgat

SEQ ID NO: 1029 - DNA, 19 bp, synthetic construct
  misc_feature 1..19: note = synthetic sequence
  source 1..19: mol_type = other DNA
  modified_base 12: mod_base = OTHER; note = uracil
  modified_base 18: mod_base = OTHER; note = uracil
catggcaaccctgggactt

SEQ ID NO: 1030 - DNA, 20 bp, synthetic construct
  misc_feature 1..20: note = synthetic sequence
  source 1..20: mol_type = other DNA
  modified_base 6: mod_base = OTHER; note = uracil
  modified_base 19: mod_base = OTHER; note = uracil
aattctgggcgggacttctc

SEQ ID NO: 1031 - DNA, 23 bp, synthetic construct
  misc_feature 1..23: note = synthetic sequence
  source 1..23: mol_type = other DNA
  modified_base 3: mod_base = OTHER; note = uracil
  modified_base 11: mod_base = OTHER; note = uracil
cctagacacctggaacagagaga

SEQ ID NO: 1032 - DNA, 20 bp, synthetic construct
  misc_feature 1..20: note = synthetic sequence
  source 1..20: mol_type = other DNA
  modified_base 10: mod_base = OTHER; note = uracil
  modified_base 17: mod_base = OTHER; note = uracil
tcacaggcctcactcgtaca

SEQ ID NO: 1033 - DNA, 25 bp, synthetic construct
  misc_feature 1..25: note = synthetic sequence
  source 1..25: mol_type = other DNA
  modified_base 10: mod_base = OTHER; note = uracil
  modified_base 21: mod_base = OTHER; note = uracil
aatgtctcatggagaagcagtgaaa

SEQ ID NO: 1034 - DNA, 24 bp, synthetic construct
  misc_feature 1..24: note = synthetic sequence
  source 1..24: mol_type = other DNA
  modified_base 3: mod_base = OTHER; note = uracil
  modified_base 18: mod_base = OTHER; note = uracil
catcaggaacaacccaatccaaag

SEQ ID NO: 1035 - DNA, 23 bp, synthetic construct
  misc_feature 1..23: note = synthetic sequence
  source 1..23: mol_type = other DNA
  modified_base 9: mod_base = OTHER; note = uracil
  modified_base 17: mod_base = OTHER; note = uracil
gcacagactgacagaatgaacct

SEQ ID NO: 1036 - DNA, 25 bp, synthetic construct
  misc_feature 1..25: note = synthetic sequence
  source 1..25: mol_type = other DNA
  modified_base 8: mod_base = OTHER; note = uracil
  modified_base 23: mod_base = OTHER; note = uracil
gccatcgtaggcatactgttcatac

SEQ ID NO: 1037 - DNA, 20 bp, synthetic construct
  misc_feature 1..20: note = synthetic sequence
  source 1..20: mol_type = other DNA
  modified_base 7: mod_base = OTHER; note = uracil
  modified_base 19: mod_base = OTHER; note = uracil
ggactttgaggcgggtgttt

SEQ ID NO: 1038 - DNA, 28 bp, synthetic construct
  misc_feature 1..28: note = synthetic sequence
  source 1..28: mol_type = other DNA
  modified_base 13: mod_base = OTHER; note = uracil
  modified_base 27: mod_base = OTHER; note = uracil
tcaatagcttgttgaactgcatgatgta

SEQ ID NO: 1039 - DNA, 22 bp, synthetic construct
  misc_feature 1..22: note = synthetic sequence
  source 1..22: mol_type = other DNA
  modified_base 8: mod_base = OTHER; note = uracil
  modified_base 20: mod_base = OTHER; note = uracil
tgccaagtcagcaattctgtga

SEQ ID NO: 1040 - DNA, 24 bp, synthetic construct
  misc_feature 1..24: note = synthetic sequence
  source 1..24: mol_type = other DNA
  modified_base 3: mod_base = OTHER; note = uracil
  modified_base 12: mod_base = OTHER; note = uracil
tctcaggtaagtaacaggccaaga

SEQ ID NO: 1041 - DNA, 20 bp, synthetic construct
  misc_feature 1..20: note = synthetic sequence
  source 1..20: mol_type = other DNA
  modified_base 10: mod_base = OTHER; note = uracil
  modified_base 17: mod_base = OTHER; note = uracil
ctgaacaactgctgcgtgat

SEQ ID NO: 1042 - DNA, 25 bp, synthetic construct
  misc_feature 1..25: note = synthetic sequence
  source 1..25: mol_type = other DNA
  modified_base 15: mod_base = OTHER; note = uracil
  modified_base 23: mod_base = OTHER; note = uracil
gactcaaacaggactgtgaacttct

SEQ ID NO: 1043 - DNA, 22 bp, synthetic construct
  misc_feature 1..22: note = synthetic sequence
  source 1..22: mol_type = other DNA
  modified_base 12: mod_base = OTHER; note = uracil
  modified_base 21: mod_base = OTHER; note = uracil
ggaattctccatcaccgtggta

SEQ ID NO: 1044 - DNA, 21 bp, synthetic construct
  misc_feature 1..21: note = synthetic sequence
  source 1..21: mol_type = other DNA
  modified_base 9: mod_base = OTHER; note = uracil
  modified_base 16: mod_base = OTHER; note = uracil
tctgagaattggcgctggaaa

SEQ ID NO: 1045 - DNA, 23 bp, synthetic construct
  misc_feature 1..23: note = synthetic sequence
  source 1..23: mol_type = other DNA
  modified_base 17: mod_base = OTHER; note = uracil
  modified_base 22: mod_base = OTHER; note = uracil
acctgaaaacccacactcgaatt

SEQ ID NO: 1046 - DNA, 20 bp, synthetic construct
  misc_feature 1..20: note = synthetic sequence
  source 1..20: mol_type = other DNA
  modified_base 4: mod_base = OTHER; note = uracil
  modified_base 15: mod_base = OTHER; note = uracil
gggtgccacagatttcacag

SEQ ID NO: 1047 - DNA, 20 bp, synthetic construct
  misc_feature 1..20: note = synthetic sequence
  source 1..20: mol_type = other DNA
  modified_base 8: mod_base = OTHER; note = uracil
  modified_base 18: mod_base = OTHER; note = uracil
gagaggatcatggcggatgg

SEQ ID NO: 1048 - DNA, 28 bp, synthetic construct
  misc_feature 1..28: note = synthetic sequence
  source 1..28: mol_type = other DNA
  modified_base 13: mod_base = OTHER; note = uracil
  modified_base 27: mod_base = OTHER; note = uracil
acactttcttcttccacaatatgcagtt

SEQ ID NO: 1049 - DNA, 21 bp, synthetic construct
  misc_feature 1..21: note = synthetic sequence
  source 1..21: mol_type = other DNA
  modified_base 8: mod_base = OTHER; note = uracil
  modified_base 18: mod_base = OTHER; note = uracil
ctcgctgtcatcctcattgct

SEQ ID NO: 1050 - DNA, 20 bp, synthetic construct
  misc_feature 1..20: note = synthetic sequence
  source 1..20: mol_type = other DNA
  modified_base 6: mod_base = OTHER; note = uracil
  modified_base 17: mod_base = OTHER; note = uracil
gcacttgccactggtgtaga

SEQ ID NO: 1051 - DNA, 27 bp, synthetic construct
  misc_feature 1..27: note = synthetic sequence
  source 1..27: mol_type = other DNA
  modified_base 10: mod_base = OTHER; note = uracil
  modified_base 22: mod_base = OTHER; note = uracil
ctaaacatctgcctgatctcatagagt

SEQ ID NO: 1052 - DNA, 22 bp, synthetic construct
  misc_feature 1..22: note = synthetic sequence
  source 1..22: mol_type = other DNA
  modified_base 9: mod_base = OTHER; note = uracil
  modified_base 19: mod_base = OTHER; note = uracil
cccacacatatgccatggtgat

SEQ ID NO: 1053 - DNA, 19 bp, synthetic construct
  misc_feature 1..19: note = synthetic sequence
  source 1..19: mol_type = other DNA
  modified_base 9: mod_base = OTHER; note = uracil
  modified_base 16: mod_base = OTHER; note = uracil
ccacctgctgcagtctaca

SEQ ID NO: 1054 - DNA, 24 bp, synthetic construct
  misc_feature 1..24: note = synthetic sequence
  source 1..24: mol_type = other DNA
  modified_base 6: mod_base = OTHER; note = uracil
  modified_base 20: mod_base = OTHER; note = uracil
ttcattgccacaaagttgatgcaa

SEQ ID NO: 1055 - DNA, 19 bp, synthetic construct
  misc_feature 1..19: note = synthetic sequence
  source 1..19: mol_type = other DNA
  modified_base 9: mod_base = OTHER; note = uracil
  modified_base 17: mod_base = OTHER; note = uracil
cctcacgctccgtttctct

SEQ ID NO: 1056 - DNA, 27 bp, synthetic construct
  misc_feature 1..27: note = synthetic sequence
  source 1..27: mol_type = other DNA
  modified_base 12: mod_base = OTHER; note = uracil
  modified_base 25: mod_base = OTHER; note = uracil
agttcacatcctccttcttcttcttct

SEQ ID NO: 1057 - DNA, 23 bp, synthetic construct
  misc_feature 1..23: note = synthetic sequence
  source 1..23: mol_type = other DNA
  modified_base 10: mod_base = OTHER; note = uracil
  modified_base 14: mod_base = OTHER; note = uracil
agtacaggatgcttgccaaaaga

SEQ ID NO: 1058 - DNA, 24 bp, synthetic construct
  misc_feature 1..24: note = synthetic sequence
  source 1..24: mol_type = other DNA
  modified_base 9: mod_base = OTHER; note = uracil
  modified_base 20: mod_base = OTHER; note = uracil
ggagaaaatcaagtcgtgctgaat

SEQ ID NO: 1059 - DNA, 20 bp, synthetic construct
  misc_feature 1..20: note = synthetic sequence
  source 1..20: mol_type = other DNA
  modified_base 5: mod_base = OTHER; note = uracil
  modified_base 17: mod_base = OTHER; note = uracil
gctctgacggcgttactgat

SEQ ID NO: 1060 - DNA, 24 bp, synthetic construct
  misc_feature 1..24: note = synthetic sequence
  source 1..24: mol_type = other DNA
  modified_base 10: mod_base = OTHER; note = uracil
  modified_base 23: mod_base = OTHER; note = uracil
tcctcccggttgtagatgtatctc

SEQ ID NO: 1061 - DNA, 20 bp, synthetic construct
  misc_feature 1..20: note = synthetic sequence
  source 1..20: mol_type = other DNA
  modified_base 10: mod_base = OTHER; note = uracil
  modified_base 19: mod_base = OTHER; note = uracil
tcaagagcgtgccctacttc

SEQ ID NO: 1062 - DNA, 25 bp, synthetic construct
  misc_feature 1..25: note = synthetic sequence
  source 1..25: mol_type = other DNA
  modified_base 10: mod_base = OTHER; note = uracil
  modified_base 24: mod_base = OTHER; note = uracil
gattgagcatccaccaagaactttt

SEQ ID NO: 1063 - DNA, 25 bp, synthetic construct
  misc_feature 1..25: note = synthetic sequence
  source 1..25: mol_type = other DNA
  modified_base 14: mod_base = OTHER; note = uracil
  modified_base 24: mod_base = OTHER; note = uracil
ccaggaggagggataatggttcata

SEQ ID NO: 1064 - DNA, 19 bp, synthetic construct
  misc_feature 1..19: note = synthetic sequence
  source 1..19: mol_type = other DNA
  modified_base 3: mod_base = OTHER; note = uracil
  modified_base 14: mod_base = OTHER; note = uracil
agtggccgggttctagagt

SEQ ID NO: 1065 - DNA, 22 bp, synthetic construct
  misc_feature 1..22: note = synthetic sequence
  source 1..22: mol_type = other DNA
  modified_base 10: mod_base = OTHER; note = uracil
  modified_base 13: mod_base = OTHER; note = uracil
tcaaagagctggtgcgaaaaga

SEQ ID NO: 1066 - DNA, 19 bp, synthetic construct
  misc_feature 1..19: note = synthetic sequence
  source 1..19: mol_type = other DNA
  modified_base 10: mod_base = OTHER; note = uracil
  modified_base 16: mod_base = OTHER; note = uracil
gcctcgccatcagcatgat

SEQ ID NO: 1067 - DNA, 20 bp, synthetic construct
  misc_feature 1..20: note = synthetic sequence
  source 1..20: mol_type = other DNA
  modified_base 3: mod_base = OTHER; note = uracil
  modified_base 10: mod_base = OTHER; note = uracil
cctgtgtggtagagcacact

SEQ ID NO: 1068 - DNA, 21 bp, synthetic construct
  misc_feature 1..21: note = synthetic sequence
  source 1..21: mol_type = other DNA
  modified_base 6: mod_base = OTHER; note = uracil
  modified_base 9: mod_base = OTHER; note = uracil
ccagctgatcacaccaagaga

SEQ ID NO: 1069 - DNA, 20 bp, synthetic construct
  misc_feature 1..20: note = synthetic sequence
  source 1..20: mol_type = other DNA
  modified_base 6: mod_base = OTHER; note = uracil
  modified_base 9: mod_base = OTHER; note = uracil
cggagtattgggaccaggag

SEQ ID NO: 1070 - DNA, 21 bp, synthetic construct
  misc_feature 1..21: note = synthetic sequence
  source 1..21: mol_type = other DNA
  modified_base 6: mod_base = OTHER; note = uracil
  modified_base 20: mod_base = OTHER; note = uracil
ccacgtcgcagccatacatta

SEQ ID NO: 1071 - DNA, 22 bp, synthetic construct
  misc_feature 1..22: note = synthetic sequence
  source 1..22: mol_type = other DNA
  modified_base 2: mod_base = OTHER; note = uracil
  modified_base 9: mod_base = OTHER; note = uracil
atgcatattcggacccacacat

SEQ ID NO: 1072 - DNA, 22 bp, synthetic construct
  misc_feature 1..22: note = synthetic sequence
  source 1..22: mol_type = other DNA
  modified_base 13: mod_base = OTHER; note = uracil
  modified_base 21: mod_base = OTHER; note = uracil
cctgtctgcaaatgctctgttg

SEQ ID NO: 1073 - DNA, 20 bp, synthetic construct
  misc_feature 1..20: note = synthetic sequence
  source 1..20: mol_type = other DNA
  modified_base 9: mod_base = OTHER; note = uracil
  modified_base 17: mod_base = OTHER; note = uracil
ggcagtgctcccaaaatgaa

SEQ ID NO: 1074 - DNA, 22 bp, synthetic construct
  misc_feature 1..22: note = synthetic sequence
  source 1..22: mol_type = other DNA
  modified_base 10: mod_base = OTHER; note = uracil
  modified_base 20: mod_base = OTHER; note = uracil
tcgcattcgttcctttcactga

SEQ ID NO: 1075 - DNA, 21 bp, synthetic construct
  misc_feature 1..21: note = synthetic sequence
  source 1..21: mol_type = other DNA
  modified_base 6: mod_base = OTHER; note = uracil
  modified_base 20: mod_base = OTHER; note = uracil
tcacctccaagacagtgcttt

SEQ ID NO: 1076 - DNA, 23 bp, synthetic construct
  misc_feature 1..23: note = synthetic sequence
  source 1..23: mol_type = other DNA
  modified_base 6: mod_base = OTHER; note = uracil
  modified_base 18: mod_base = OTHER; note = uracil
tcagctcaggaccttcatacaca

SEQ ID NO: 1077 - DNA, 19 bp, synthetic construct
  misc_feature 1..19: note = synthetic sequence
  source 1..19: mol_type = other DNA
  modified_base 7: mod_base = OTHER; note = uracil
  modified_base 15: mod_base = OTHER; note = uracil
cgagcttctgcgtctgact

SEQ ID NO: 1078 - DNA, 22 bp, synthetic construct
  misc_feature 1..22: note = synthetic sequence
  source 1..22: mol_type = other DNA
  modified_base 9: mod_base = OTHER; note = uracil
  modified_base 19: mod_base = OTHER; note = uracil
agatcttctccttggtgctcct

SEQ ID NO: 1079 - DNA, 26 bp, synthetic construct
  misc_feature 1..26: note = synthetic sequence
  source 1..26: mol_type = other DNA
  modified_base 13: mod_base = OTHER; note = uracil
  modified_base 22: mod_base = OTHER; note = uracil
ccttcttcaagatcagttacctcacc

SEQ ID NO: 1080 - DNA, 23 bp, synthetic construct
  misc_feature 1..23: note = synthetic sequence
  source 1..23: mol_type = other DNA
  modified_base 9: mod_base = OTHER; note = uracil
  modified_base 18: mod_base = OTHER; note = uracil
acagtctctgtgagctctgacat

SEQ ID NO: 1081 - DNA, 20 bp, synthetic construct
  misc_feature 1..20: note = synthetic sequence
  source 1..20: mol_type = other DNA
  modified_base 3: mod_base = OTHER; note = uracil
  modified_base 16: mod_base = OTHER; note = uracil
cctgcccccaatttgtcagt

SEQ ID NO: 1082 - DNA, 23 bp, synthetic construct
  misc_feature 1..23: note = synthetic sequence
  source 1..23: mol_type = other DNA
  modified_base 9: mod_base = OTHER; note = uracil
  modified_base 17: mod_base = OTHER; note = uracil
gctttgggtagaatcctgagaca

SEQ ID NO: 1083 - DNA, 25 bp, synthetic construct
  misc_feature 1..25: note = synthetic sequence
  source 1..25: mol_type = other DNA
  modified_base 14: mod_base = OTHER; note = uracil
  modified_base 23: mod_base = OTHER; note = uracil
gatgaacgcaaacttcgtactttct

SEQ ID NO: 1084 - DNA, 20 bp, synthetic construct
  misc_feature 1..20: note = synthetic sequence
  source 1..20: mol_type = other DNA
  modified_base 14: mod_base = OTHER; note = uracil
  modified_base 18: mod_base = OTHER; note = uracil
ggtcaagacaccctgcttca

SEQ ID NO: 1085 - DNA, 23 bp, synthetic construct
  misc_feature 1..23: note = synthetic sequence
  source 1..23: mol_type = other DNA
  modified_base 10: mod_base = OTHER; note = uracil
  modified_base 22: mod_base = OTHER; note = uracil
cgtcgtgtctcaagatctagctt

SEQ ID NO: 1086 - DNA, 22 bp, synthetic construct
  misc_feature 1..22: note = synthetic sequence
  source 1..22: mol_type = other DNA
  modified_base 10: mod_base = OTHER; note = uracil
  modified_base 20: mod_base = OTHER; note = uracil
tgagtcatctgcggtactgtct

SEQ ID NO: 1087 - DNA, 21 bp, synthetic construct
  misc_feature 1..21: note = synthetic sequence
  source 1..21: mol_type = other DNA
  modified_base 9: mod_base = OTHER; note = uracil
  modified_base 18: mod_base = OTHER; note = uracil
gccatttatggcctccatcca

SEQ ID NO: 1088 - DNA, 21 bp, synthetic construct
  misc_feature 1..21: note = synthetic sequence
  source 1..21: mol_type = other DNA
  modified_base 10: mod_base = OTHER; note = uracil
  modified_base 18: mod_base = OTHER; note = uracil
gagagagagtgtgcgcctaaa

SEQ ID NO: 1089 - DNA, 22 bp, synthetic construct
  misc_feature 1..22: note = synthetic sequence
  source 1..22: mol_type = other DNA
  modified_base 3: mod_base = OTHER; note = uracil
  modified_base 15: mod_base = OTHER; note = uracil
actaaccaacccactgggagaa

SEQ ID NO: 1090 - DNA, 22 bp, synthetic construct
  misc_feature 1..22: note = synthetic sequence
  source 1..22: mol_type = other DNA
  modified_base 11: mod_base = OTHER; note = uracil
  modified_base 21: mod_base = OTHER; note = uracil
tcaatgatgctgggaccttgtg

SEQ ID NO: 1091 - DNA, 19 bp, synthetic construct
  misc_feature 1..19: note = synthetic sequence
  source 1..19: mol_type = other DNA
  modified_base 9: mod_base = OTHER; note = uracil
  modified_base 12: mod_base = OTHER; note = uracil
gcgggacgtcgtagagaaa

SEQ ID NO: 1092 - DNA, 22 bp, synthetic construct
  misc_feature 1..22: note = synthetic sequence
  source 1..22: mol_type = other DNA
  modified_base 11: mod_base = OTHER; note = uracil
  modified_base 19: mod_base = OTHER; note = uracil
cctctcaggatgaggacttgga

SEQ ID NO: 1093 - DNA, 21 bp, synthetic construct
  misc_feature 1..21: note = synthetic sequence
  source 1..21: mol_type = other DNA
  modified_base 6: mod_base = OTHER; note = uracil
  modified_base 17: mod_base = OTHER; note = uracil
caggttcccctcacagtcaat

SEQ ID NO: 1094 - DNA, 21 bp, synthetic construct
  misc_feature 1..21: note = synthetic sequence
  source 1..21: mol_type = other DNA
  modified_base 8: mod_base = OTHER; note = uracil
  modified_base 18: mod_base = OTHER; note = uracil
catgtagtggcacctgctgaa

SEQ ID NO: 1095 - DNA, 19 bp, synthetic construct
  misc_feature 1..19: note = synthetic sequence
  source 1..19: mol_type = other DNA
  modified_base 9: mod_base = OTHER; note = uracil
  modified_base 15: mod_base = OTHER; note = uracil
gggagacgttcagctaccc

SEQ ID NO: 1096 - DNA, 24 bp, synthetic construct
  misc_feature 1..24: note = synthetic sequence
  source 1..24: mol_type = other DNA
  modified_base 8: mod_base = OTHER; note = uracil
  modified_base 23: mod_base = OTHER; note = uracil
gggcaactcagagatagctttctt

SEQ ID NO: 1097 - DNA, 20 bp, synthetic construct
  misc_feature 1..20: note = synthetic sequence
  source 1..20: mol_type = other DNA
  modified_base 12: mod_base = OTHER; note = uracil
  modified_base 17: mod_base = OTHER; note = uracil
cacggacaaagtcccttgga

SEQ ID NO: 1098 - DNA, 20 bp, synthetic construct
  misc_feature 1..20: note = synthetic sequence
  source 1..20: mol_type = other DNA
  modified_base 11: mod_base = OTHER; note = uracil
  modified_base 17: mod_base = OTHER; note = uracil
ccaaaggccctctcgttcac

SEQ ID NO: 1099 - DNA, 19 bp, synthetic construct
  misc_feature 1..19: note = synthetic sequence
  source 1..19: mol_type = other DNA
  modified_base 13: mod_base = OTHER; note = uracil
  modified_base 17: mod_base = OTHER; note = uracil
caggcggaggcatccttac

SEQ ID NO: 1100 - DNA, 27 bp, synthetic construct
  misc_feature 1..27: note = synthetic sequence
  source 1..27: mol_type = other DNA
  modified_base 11: mod_base = OTHER; note = uracil
  modified_base 26: mod_base = OTHER; note = uracil
aggaactgtgtcattggtgtagatttc

SEQ ID NO: 1101 - DNA, 25 bp, synthetic construct
  misc_feature 1..25: note = synthetic sequence
  source 1..25: mol_type = other DNA
  modified_base 12: mod_base = OTHER; note = uracil
  modified_base 24: mod_base = OTHER; note = uracil
actggccttggtttaattgtgactt

SEQ ID NO: 1102 - DNA, 19 bp, synthetic construct
  misc_feature 1..19: note = synthetic sequence
  source 1..19: mol_type = other DNA
  modified_base 2: mod_base = OTHER; note = uracil
  modified_base 6: mod_base = OTHER; note = uracil
ctcagtccaaccacagcga

SEQ ID NO: 1103 - DNA, 19 bp, synthetic construct
  misc_feature 1..19: note = synthetic sequence
  source 1..19: mol_type = other DNA
  modified_base 8: mod_base = OTHER; note = uracil
  modified_base 12: mod_base = OTHER; note = uracil
caggcactccttggagcaa

SEQ ID NO: 1104 - DNA, 20 bp, synthetic construct
  misc_feature 1..20: note = synthetic sequence
  source 1..20: mol_type = other DNA
  modified_base 10: mod_base = OTHER; note = uracil
  modified_base 17: mod_base = OTHER; note = uracil
gcactggagtggcagatagt

SEQ ID NO: 1105 - DNA, 22 bp, synthetic construct
  misc_feature 1..22: note = synthetic sequence
  source 1..22: mol_type = other DNA
  modified_base 8: mod_base = OTHER; note = uracil
  modified_base 19: mod_base = OTHER; note = uracil
gcgactttacccttcgactaga

SEQ ID NO: 1106 - DNA, 20 bp, synthetic construct
  misc_feature 1..20: note = synthetic sequence
  source 1..20: mol_type = other DNA
  modified_base 5: mod_base = OTHER; note = uracil
  modified_base 11: mod_base = OTHER; note = uracil
gggatccaggtgacccaaag

SEQ ID NO: 1107 - DNA, 18 bp, synthetic construct
  misc_feature 1..18: note = synthetic sequence
  source 1..18: mol_type = other DNA
  modified_base 5: mod_base = OTHER; note = uracil
  modified_base 16: mod_base = OTHER; note = uracil
gccctgcacgtggtgtaa

SEQ ID NO: 1108 - DNA, 22 bp, synthetic construct
  misc_feature 1..22: note = synthetic sequence
  source 1..22: mol_type = other DNA
  modified_base 12: mod_base = OTHER; note = uracil
  modified_base 21: mod_base = OTHER; note = uracil
caactccaggcttgtagctgtc

SEQ ID NO: 1109 - DNA, 28 bp, synthetic construct
  misc_feature 1..28: note = synthetic sequence
  source 1..28: mol_type = other DNA
  modified_base 10: mod_base = OTHER; note = uracil
  modified_base 27: mod_base = OTHER; note = uracil
gaccgatgatcaggatatctacaaggta

SEQ ID NO: 1110 - DNA, 20 bp, synthetic construct
  misc_feature 1..20: note = synthetic sequence
  source 1..20: mol_type = other DNA
  modified_base 11: mod_base = OTHER; note = uracil
  modified_base 18: mod_base = OTHER; note = uracil
acctcacaggtcagggttgt

SEQ ID NO: 1111 - DNA, 24 bp, synthetic construct
  misc_feature 1..24: note = synthetic sequence
  source 1..24: mol_type = other DNA
  modified_base 11: mod_base = OTHER; note = uracil
  modified_base 23: mod_base = OTHER; note = uracil
gtcctgtctctcctcatgctagta

SEQ ID NO: 1112 - DNA, 26 bp, synthetic construct
  misc_feature 1..26: note = synthetic sequence
  source 1..26: mol_type = other DNA
  modified_base 10: mod_base = OTHER; note = uracil
  modified_base 21: mod_base = OTHER; note = uracil
ctgctggtctcatagtaatctaccac

SEQ ID NO: 1113 - DNA, 18 bp, synthetic construct
  misc_feature 1..18: note = synthetic sequence
  source 1..18: mol_type = other DNA
  modified_base 6: mod_base = OTHER; note = uracil
  modified_base 13: mod_base = OTHER; note = uracil
caggctccaacctccagc

SEQ ID NO: 1114 - DNA, 20 bp, synthetic construct
  misc_feature 1..20: note = synthetic sequence
  source 1..20: mol_type = other DNA
  modified_base 4: mod_base = OTHER; note = uracil
  modified_base 12: mod_base = OTHER; note = uracil
agctggagtgttaggagggc

SEQ ID NO: 1115 - DNA, 19 bp, synthetic construct
  misc_feature 1..19: note = synthetic sequence
  source 1..19: mol_type = other DNA
  modified_base 9: mod_base = OTHER; note = uracil
  modified_base 16: mod_base = OTHER; note = uracil
agcccccattcctgttgac

SEQ ID NO: 1116 - DNA, 18 bp, synthetic construct
  misc_feature 1..18: note = synthetic sequence
  source 1..18: mol_type = other DNA
  modified_base 9: mod_base = OTHER; note = uracil
  modified_base 16: mod_base = OTHER; note = uracil
gatatcgctgccgcctgt

SEQ ID NO: 1117 - DNA, 21 bp, synthetic construct
  misc_feature 1..21: note = synthetic sequence
  source 1..21: mol_type = other DNA
  modified_base 12: mod_base = OTHER; note = uracil
  modified_base 20: mod_base = OTHER; note = uracil
gggctgaaccatacactcctt

SEQ ID NO: 1118 - DNA, 33 bp, synthetic construct
  misc_feature 1..33: note = synthetic sequence
  source 1..33: mol_type = other DNA
  modified_base 15: mod_base = OTHER; note = uracil
  modified_base 29: mod_base = OTHER; note = uracil
aatcaactgagtaatatgaagtattgactgaca

SEQ ID NO: 1119 - DNA, 19 bp, synthetic construct
  misc_feature 1..19: note = synthetic sequence
  source 1..19: mol_type = other DNA
  modified_base 6: mod_base = OTHER; note = uracil
  modified_base 14: mod_base = OTHER; note = uracil
ccccctgccagtatagcct

SEQ ID NO: 1120 - DNA, 19 bp, synthetic construct
  misc_feature 1..19: note = synthetic sequence
  source 1..19: mol_type = other DNA
  modified_base 7: mod_base = OTHER; note = uracil
  modified_base 17: mod_base = OTHER; note = uracil
gtgatctgcctcgtggtgt

SEQ ID NO: 1121 - DNA, 20 bp, synthetic construct
  misc_feature 1..20: note = synthetic sequence
  source 1..20: mol_type = other DNA
  modified_base 7: mod_base = OTHER; note = uracil
  modified_base 17: mod_base = OTHER; note = uracil
gaagtgtggccagaagtgga

SEQ ID NO: 1122 - DNA, 28 bp, synthetic construct
  misc_feature 1..28: note = synthetic sequence
  source 1..28: mol_type = other DNA
  modified_base 14: mod_base = OTHER; note = uracil
  modified_base 27: mod_base = OTHER; note = uracil
tcgtttggctggatcatagattaacatt

SEQ ID NO: 1123 - DNA, 17 bp, synthetic construct
  misc_feature 1..17: note = synthetic sequence
  source 1..17: mol_type = other DNA
  modified_base 6: mod_base = OTHER; note = uracil
  modified_base 16: mod_base = OTHER; note = uracil
catcctgggccaggctc

SEQ ID NO: 1124 - DNA, 20 bp, synthetic construct
  misc_feature 1..20: note = synthetic sequence
  source 1..20: mol_type = other DNA
  modified_base 5: mod_base = OTHER; note = uracil
  modified_base 16: mod_base = OTHER; note = uracil
ggcttcagggctgaatggat

SEQ ID NO: 1125 - DNA, 21 bp, synthetic construct
  misc_feature 1..21: note = synthetic sequence
  source 1..21: mol_type = other DNA
  modified_base 8: mod_base = OTHER; note = uracil
  modified_base 14: mod_base = OTHER; note = uracil
tgcgtgatccacatcaacagg

SEQ ID NO: 1126 - DNA, 17 bp, synthetic construct
  misc_feature 1..17: note = synthetic sequence
  source 1..17: mol_type = other DNA
  modified_base 2: mod_base = OTHER; note = uracil
  modified_base 10: mod_base = OTHER; note = uracil
gtcccgggatgccgcac

SEQ ID NO: 1127 - DNA, 23 bp, synthetic construct
  misc_feature 1..23: note = synthetic sequence
  source 1..23: mol_type = other DNA
  modified_base 11: mod_base = OTHER; note = uracil
  modified_base 20: mod_base = OTHER; note = uracil
ataacaggcctcagccaaatcat

SEQ ID NO: 1128 - DNA, 22 bp, synthetic construct
  misc_feature 1..22: note = synthetic sequence
  source 1..22: mol_type = other DNA
  modified_base 3: mod_base = OTHER; note = uracil
  modified_base 10: mod_base = OTHER; note = uracil
ggtaaagtctgagcaggacagg

SEQ ID NO: 1129 - DNA, 26 bp, synthetic construct
  misc_feature 1..26: note = synthetic sequence
  source 1..26: mol_type = other DNA
  modified_base 14: mod_base = OTHER; note = uracil
  modified_base 23: mod_base = OTHER; note = uracil
aatataacaggcctcagccaaatcat

SEQ ID NO: 1130 - DNA, 20 bp, synthetic construct
  misc_feature 1..20: note = synthetic sequence
  source 1..20: mol_type = other DNA
  modified_base 10: mod_base = OTHER; note = uracil
  modified_base 19: mod_base = OTHER; note = uracil
agctgactgtgctgtgcttt

SEQ ID NO: 1131 - DNA, 23 bp, synthetic construct
  misc_feature 1..23: note = synthetic sequence
  source 1..23: mol_type = other DNA
  modified_base 9: mod_base = OTHER; note = uracil
  modified_base 20: mod_base = OTHER; note = uracil
gtccccaatataacaggcctcag

SEQ ID NO: 1132 - DNA, 17 bp, synthetic construct
  misc_feature 1..17: note = synthetic sequence
  source 1..17: mol_type = other DNA
  modified_base 14: mod_base = OTHER; note = uracil
  modified_base 16: mod_base = OTHER; note = uracil
acagagcacccgctgtc

SEQ ID NO: 1133 - DNA, 22 bp, synthetic construct
  misc_feature 1..22: note = synthetic sequence
  source 1..22: mol_type = other DNA
  modified_base 9: mod_base = OTHER; note = uracil
  modified_base 18: mod_base = OTHER; note = uracil
ccccaatataacaggcctcagc

SEQ ID NO: 1134 - DNA, 21 bp, synthetic construct
  misc_feature 1..21: note = synthetic sequence
  source 1..21: mol_type = other DNA
  modified_base 5: mod_base = OTHER; note = uracil
  modified_base 17: mod_base = OTHER; note = uracil
aggatgagagaacccctggag

SEQ ID NO: 1135 - DNA, 22 bp, synthetic construct
  misc_feature 1..22: note = synthetic sequence
  source 1..22: mol_type = other DNA
  modified_base 8: mod_base = OTHER; note = uracil
  modified_base 20: mod_base = OTHER; note = uracil
tatgagttggcgaggaagatcg

SEQ ID NO: 1136 - DNA, 21 bp, synthetic construct
  misc_feature 1..21: note = synthetic sequence
  source 1..21: mol_type = other DNA
  modified_base 7: mod_base = OTHER; note = uracil
  modified_base 18: mod_base = OTHER; note = uracil
ggatcctgacgttgagttgct

SEQ ID NO: 1137 - DNA, 22 bp, synthetic construct
  misc_feature 1..22: note = synthetic sequence
  source 1..22: mol_type = other DNA
  modified_base 8: mod_base = OTHER; note = uracil
  modified_base 20: mod_base = OTHER; note = uracil
tatgagttggcgaggaagatcg

SEQ ID NO: 1138 - DNA, 21 bp, synthetic construct
  misc_feature 1..21: note = synthetic sequence
  source 1..21: mol_type = other DNA
  modified_base 7: mod_base = OTHER; note = uracil
  modified_base 18: mod_base = OTHER; note = uracil
ggatcctgacgttgagttgct

SEQ ID NO: 1139 - DNA, 22 bp, synthetic construct
  misc_feature 1..22: note = synthetic sequence
  source 1..22: mol_type = other DNA
  modified_base 8: mod_base = OTHER; note = uracil
  modified_base 20: mod_base = OTHER; note = uracil
tatgagttggcgaggaagatcg

SEQ ID NO: 1140 - DNA, 21 bp, synthetic construct
  misc_feature 1..21: note = synthetic sequence
  source 1..21: mol_type = other DNA
  modified_base 7: mod_base = OTHER; note = uracil
  modified_base 18: mod_base = OTHER; note = uracil
ggatcctgacgttgagttgct

SEQ ID NO: 1141 - DNA, 22 bp, synthetic construct
  misc_feature 1..22: note = synthetic sequence
  source 1..22: mol_type = other DNA
  modified_base 8: mod_base = OTHER; note = uracil
  modified_base 20: mod_base = OTHER; note = uracil
tatgagttggcgaggaagatcg

SEQ ID NO: 1142 - DNA, 21 bp, synthetic construct
  misc_feature 1..21: note = synthetic sequence
  source 1..21: mol_type = other DNA
  modified_base 7: mod_base = OTHER; note = uracil
  modified_base 18: mod_base = OTHER; note = uracil
ggatcctgacgttgagttgct

SEQ ID NO: 1143 - DNA, 22 bp, synthetic construct
  misc_feature 1..22: note = synthetic sequence
  source 1..22: mol_type = other DNA
  modified_base 8: mod_base = OTHER; note = uracil
  modified_base 20: mod_base = OTHER; note = uracil
tatgagttggcgaggaagatcg

SEQ ID NO: 1144 - DNA, 21 bp, synthetic construct
  misc_feature 1..21: note = synthetic sequence
  source 1..21: mol_type = other DNA
  modified_base 7: mod_base = OTHER; note = uracil
  modified_base 18: mod_base = OTHER; note = uracil
ggatcctgacgttgagttgct

SEQ ID NO: 1145 - DNA, 22 bp, synthetic construct
  misc_feature 1..22: note = synthetic sequence
  source 1..22: mol_type = other DNA
  modified_base 10: mod_base = OTHER; note = uracil
  modified_base 19: mod_base = OTHER; note = uracil
catggatgctgatgagggtcaa

SEQ ID NO: 1146 - DNA, 23 bp, synthetic construct
  misc_feature 1..23: note = synthetic sequence
  source 1..23: mol_type = other DNA
  modified_base 12: mod_base = OTHER; note = uracil
  modified_base 22: mod_base = OTHER; note = uracil
gactctgtcactcttggagcttt

SEQ ID NO: 1147 - DNA, 27 bp, synthetic construct
  misc_feature 1..27: note = synthetic sequence
  source 1..27: mol_type = other DNA
  modified_base 16: mod_base = OTHER; note = uracil
  modified_base 26: mod_base = OTHER; note = uracil
gaataccaataccaatcccaaaaggtc

SEQ ID NO: 1148 - DNA, 17 bp, synthetic construct
  misc_feature 1..17: note = synthetic sequence
  source 1..17: mol_type = other DNA
  modified_base 6: mod_base = OTHER; note = uracil
  modified_base 16: mod_base = OTHER; note = uracil
ccaagtggcggcacttt

SEQ ID NO: 1149 - DNA, 30 bp, synthetic construct
  misc_feature 1..30: note = synthetic sequence
  source 1..30: mol_type = other DNA
  modified_base 12: mod_base = OTHER; note = uracil
  modified_base 27: mod_base = OTHER; note = uracil
aatccatctgttcagaaattctacaatggt

SEQ ID NO: 1150 - DNA, 26 bp, synthetic construct
  misc_feature 1..26: note = synthetic sequence
  source 1..26: mol_type = other DNA
  modified_base 7: mod_base = OTHER; note = uracil
  modified_base 14: mod_base = OTHER; note = uracil
aaaaactttcacttaagacccaggga

SEQ ID NO: 1151 - DNA, 32 bp, synthetic construct
  misc_feature 1..32: note = synthetic sequence
  source 1..32: mol_type = other DNA
  modified_base 11: mod_base = OTHER; note = uracil
  modified_base 26: mod_base = OTHER; note = uracil
tttggagaagtgatttgaatctttctaggaat

SEQ ID NO: 1152 - DNA, 28 bp, synthetic construct
  misc_feature 1..28: note = synthetic sequence
  source 1..28: mol_type = other DNA
  modified_base 5: mod_base = OTHER; note = uracil
  modified_base 14: mod_base = OTHER; note = uracil
tcaattaaaaagctgaagaggaaaccac

SEQ ID NO: 1153 - DNA, 22 bp, synthetic construct
  misc_feature 1..22: note = synthetic sequence
  source 1..22: mol_type = other DNA
  modified_base 13: mod_base = OTHER; note = uracil
  modified_base 17: mod_base = OTHER; note = uracil
agggaacagcacttcttcaagg

SEQ ID NO: 1154 - DNA, 24 bp, synthetic construct
  misc_feature 1..24: note = synthetic sequence
  source 1..24: mol_type = other DNA
  modified_base 7: mod_base = OTHER; note = uracil
  modified_base 15: mod_base = OTHER; note = uracil
gctagcttggctgataacaacaca

SEQ ID NO: 1155 - DNA, 19 bp, synthetic construct
  misc_feature 1..19: note = synthetic sequence
  source 1..19: mol_type = other DNA
  modified_base 3: mod_base = OTHER; note = uracil
  modified_base 7: mod_base = OTHER; note = uracil
cctgtctgcacagacagca

SEQ ID NO: 1156 - DNA, 17 bp, synthetic construct
  misc_feature 1..17: note = synthetic sequence
  source 1..17: mol_type = other DNA
  modified_base 10: mod_base = OTHER; note = uracil
  modified_base 14: mod_base = OTHER; note = uracil
caggcgacctgggtggg

SEQ ID NO: 1157 - DNA, 20 bp, synthetic construct
  misc_feature 1..20: note = synthetic sequence
  source 1..20: mol_type = other DNA
  modified_base 8: mod_base = OTHER; note = uracil
  modified_base 18: mod_base = OTHER; note = uracil
ggctctttccgtgactctcc

SEQ ID NO: 1158 - DNA, 19 bp, synthetic construct
  misc_feature 1..19: note = synthetic sequence
  source 1..19: mol_type = other DNA
  modified_base 6: mod_base = OTHER; note = uracil
  modified_base 16: mod_base = OTHER; note = uracil
gaacatgcaggtgtctggg

SEQ ID NO: 1159 - DNA, 24 bp, synthetic construct
  misc_feature 1..24: note = synthetic sequence
  source 1..24: mol_type = other DNA
  modified_base 11: mod_base = OTHER; note = uracil
  modified_base 20: mod_base = OTHER; note = uracil
atgatgactctgatcagggtagca

SEQ ID NO: 1160 - DNA, 22 bp, synthetic construct
  misc_feature 1..22: note = synthetic sequence
  source 1..22: mol_type = other DNA
  modified_base 13: mod_base = OTHER; note = uracil
  modified_base 21: mod_base = OTHER; note = uracil
gagagcaagaggtcaagagctg

SEQ ID NO: 1161 - DNA, 17 bp, synthetic construct
  misc_feature 1..17: note = synthetic sequence
  source 1..17: mol_type = other DNA
  modified_base 12: mod_base = OTHER; note = uracil
  modified_base 16: mod_base = OTHER; note = uracil
tgccggacgggttcctc

SEQ ID NO: 1162 - DNA, 17 bp, synthetic construct
  misc_feature 1..17: note = synthetic sequence
  source 1..17: mol_type = other DNA
  modified_base 3: mod_base = OTHER; note = uracil
  modified_base 10: mod_base = OTHER; note = uracil
tgtgcaggctgcagagc

SEQ ID NO: 1163 - DNA, 17 bp, synthetic construct
  misc_feature 1..17: note = synthetic sequence
  source 1..17: mol_type = other DNA
  modified_base 9: mod_base = OTHER; note = uracil
  modified_base 16: mod_base = OTHER; note = uracil
cgctgtcctccgcgctg

SEQ ID NO: 1164 - DNA, 19 bp, synthetic construct
  misc_feature 1..19: note = synthetic sequence
  source 1..19: mol_type = other DNA
  modified_base 2: mod_base = OTHER; note = uracil
  modified_base 15: mod_base = OTHER; note = uracil
ctgcagacgagcactgagc

SEQ ID NO: 1165 - DNA, 28 bp, synthetic construct
  misc_feature 1..28: note = synthetic sequence
  source 1..28: mol_type = other DNA
  modified_base 10: mod_base = OTHER; note = uracil
  modified_base 26: mod_base = OTHER; note = uracil
cggttagggtcattatccaaatcattcc

SEQ ID NO: 1166 - DNA, 25 bp, synthetic construct
  misc_feature 1..25: note = synthetic sequence
  source 1..25: mol_type = other DNA
  modified_base 9: mod_base = OTHER; note = uracil
  modified_base 19: mod_base = OTHER; note = uracil
aggaagagtgggaaaagatgaaagc

SEQ ID NO: 1167 - DNA, 18 bp, synthetic construct
  misc_feature 1..18: note = synthetic sequence
  source 1..18: mol_type = other DNA
  modified_base 7: mod_base = OTHER; note = uracil
  modified_base 16: mod_base = OTHER; note = uracil
acggtgtcccccaactct

SEQ ID NO: 1168 - DNA, 17 bp, synthetic construct
  misc_feature 1..17: note = synthetic sequence
  source 1..17: mol_type = other DNA
  modified_base 7: mod_base = OTHER; note = uracil
  modified_base 14: mod_base = OTHER; note = uracil
gggagctgccccatgct

SEQ ID NO: 1169 - DNA, 18 bp, synthetic construct
  misc_feature 1..18: note = synthetic sequence
  source 1..18: mol_type = other DNA
  modified_base 10: mod_base = OTHER; note = uracil
  modified_base 16: mod_base = OTHER; note = uracil
gttccggcgtcaaggtga

SEQ ID NO: 1170 - DNA, 30 bp, synthetic construct
  misc_feature 1..30: note = synthetic sequence
  source 1..30: mol_type = other DNA
  modified_base 19: mod_base = OTHER; note = uracil
  modified_base 29: mod_base = OTHER; note = uracil
atctaatataaaaccagcttgcgttgtttc

SEQ ID NO: 1171 - DNA, 25 bp, synthetic construct
  misc_feature 1..25: note = synthetic sequence
  source 1..25: mol_type = other DNA
  modified_base 11: mod_base = OTHER; note = uracil
  modified_base 21: mod_base = OTHER; note = uracil
aggaatgacgtaggaccctatgaat

SEQ ID NO: 1172 - DNA, 23 bp, synthetic construct
  misc_feature 1..23: note = synthetic sequence
  source 1..23: mol_type = other DNA
  modified_base 10: mod_base = OTHER; note = uracil
  modified_base 20: mod_base = OTHER; note = uracil
gttgagatttacccctgcatggt

SEQ ID NO: 1173 - DNA, 27 bp, synthetic construct
  misc_feature 1..27: note = synthetic sequence
  source 1..27: mol_type = other DNA
  modified_base 8: mod_base = OTHER; note = uracil
  modified_base 18: mod_base = OTHER; note = uracil
cgttttctccatagtcataggaagagc

SEQ ID NO: 1174 - DNA, 21 bp, synthetic construct
  misc_feature 1..21: note = synthetic sequence
  source 1..21: mol_type = other DNA
  modified_base 2: mod_base = OTHER; note = uracil
  modified_base 10: mod_base = OTHER; note = uracil
ctgcaggtttccaaccacaag

SEQ ID NO: 1175 - DNA, 25 bp, synthetic construct
  misc_feature 1..25: note = synthetic sequence
  source 1..25: mol_type = other DNA
  modified_base 11: mod_base = OTHER; note = uracil
  modified_base 24: mod_base = OTHER; note = uracil
ccaacataagtcacaatggcaccta

SEQ ID NO: 1176 - DNA, 20 bp, synthetic construct
  misc_feature 1..20: note = synthetic sequence
  source 1..20: mol_type = other DNA
  modified_base 6: mod_base = OTHER; note = uracil
  modified_base 12: mod_base = OTHER; note = uracil
ccagattcccctccaggagt

SEQ ID NO: 1177 - DNA, 25 bp, synthetic construct
  misc_feature 1..25: note = synthetic sequence
  source 1..25: mol_type = other DNA
  modified_base 4: mod_base = OTHER; note = uracil
  modified_base 18: mod_base = OTHER; note = uracil
cattccaaaagccacactcaaagat

SEQ ID NO: 1178 - DNA, 22 bp, synthetic construct
  misc_feature 1..22: note = synthetic sequence
  source 1..22: mol_type = other DNA
  modified_base 11: mod_base = OTHER; note = uracil
  modified_base 20: mod_base = OTHER; note = uracil
ggtacccaggtggagagaatga

SEQ ID NO: 1179 - DNA, 25 bp, synthetic construct
  misc_feature 1..25: note = synthetic sequence
  source 1..25: mol_type = other DNA
  modified_base 11: mod_base = OTHER; note = uracil
  modified_base 24: mod_base = OTHER; note = uracil
ctgacgaaattccacaaaacctctt

SEQ ID NO: 1180 - DNA, 20 bp, synthetic construct
  misc_feature 1..20: note = synthetic sequence
  source 1..20: mol_type = other DNA
  modified_base 9: mod_base = OTHER; note = uracil
  modified_base 18: mod_base = OTHER; note = uracil
gggactggtggttgtgatgg

SEQ ID NO: 1181 - DNA, 23 bp, synthetic construct
  misc_feature 1..23: note = synthetic sequence
  source 1..23: mol_type = other DNA
  modified_base 10: mod_base = OTHER; note = uracil
  modified_base 21: mod_base = OTHER; note = uracil
gagcagagatacacgtgccatat

SEQ ID NO: 1182 - DNA, 20 bp, synthetic construct
  misc_feature 1..20: note = synthetic sequence
  source 1..20: mol_type = other DNA
  modified_base 4: mod_base = OTHER; note = uracil
  modified_base 16: mod_base = OTHER; note = uracil
agctccaaggacagctagga

SEQ ID NO: 1183 - DNA, 25 bp, synthetic construct
  misc_feature 1..25: note = synthetic sequence
  source 1..25: mol_type = other DNA
  modified_base 9: mod_base = OTHER; note = uracil
  modified_base 21: mod_base = OTHER; note = uracil
ggctcttatgaatcccatcctgaaa

SEQ ID NO: 1184 - DNA, 28 bp, synthetic construct
  misc_feature 1..28: note = synthetic sequence
  source 1..28: mol_type = other DNA
  modified_base 11: mod_base = OTHER; note = uracil
  modified_base 27: mod_base = OTHER; note = uracil
agagaagaggtgagagaagaaacatttg

SEQ ID NO: 1185 - DNA, 28 bp, synthetic construct
  misc_feature 1..28: note = synthetic sequence
  source 1..28: mol_type = other DNA
  modified_base 9: mod_base = OTHER; note = uracil
  modified_base 20: mod_base = OTHER; note = uracil
tttaaagatgaccagagcatccaaaaga

SEQ ID NO: 1186 - DNA, 22 bp, synthetic construct
  misc_feature 1..22: note = synthetic sequence
  source 1..22: mol_type = other DNA
  modified_base 10: mod_base = OTHER; note = uracil
  modified_base 18: mod_base = OTHER; note = uracil
tgctttgcgttggacattcaag

SEQ ID NO: 1187 - DNA, 17 bp, synthetic construct
  misc_feature 1..17: note = synthetic sequence
  source 1..17: mol_type = other DNA
  modified_base 8: mod_base = OTHER; note = uracil
  modified_base 13: mod_base = OTHER; note = uracil
gctgagctgagctcggt

SEQ ID NO: 1188 - DNA, 20 bp, synthetic construct
  misc_feature 1..20: note = synthetic sequence
  source 1..20: mol_type = other DNA
  modified_base 2: mod_base = OTHER; note = uracil
  modified_base 7: mod_base = OTHER; note = uracil
ctgatttcaccaggcgacct

SEQ ID NO: 1189 - DNA, 25 bp, synthetic construct
  misc_feature 1..25: note = synthetic sequence
  source 1..25: mol_type = other DNA
  modified_base 12: mod_base = OTHER; note = uracil
  modified_base 24: mod_base = OTHER; note = uracil
ggttgatgcactgatggatgagatt

SEQ ID NO: 1190 - DNA, 22 bp, synthetic construct
  misc_feature 1..22: note = synthetic sequence
  source 1..22: mol_type = other DNA
  modified_base 10: mod_base = OTHER; note = uracil
  modified_base 18: mod_base = OTHER; note = uracil
cctcagcgatgatgctatccag

SEQ ID NO: 1191 - DNA, 21 bp, synthetic construct
  misc_feature 1..21: note = synthetic sequence
  source 1..21: mol_type = other DNA
  modified_base 12: mod_base = OTHER; note = uracil
  modified_base 20: mod_base = OTHER; note = uracil
agcaaagtgcgtgaggagttt

SEQ ID NO: 1192 - DNA, 20 bp, synthetic construct
  misc_feature 1..20: note = synthetic sequence
  source 1..20: mol_type = other DNA
  modified_base 4: mod_base = OTHER; note = uracil
  modified_base 11: mod_base = OTHER; note = uracil
cgcttctcactgagagcagt

SEQ ID NO: 1193 - DNA, 21 bp, synthetic construct
  misc_feature 1..21: note = synthetic sequence
  source 1..21: mol_type = other DNA
  modified_base 6: mod_base = OTHER; note = uracil
  modified_base 12: mod_base = OTHER; note = uracil
gcggatggtgttccaagaaaa

SEQ ID NO: 1194 - DNA, 22 bp, synthetic construct
  misc_feature 1..22: note = synthetic sequence
  source 1..22: mol_type = other DNA
  modified_base 10: mod_base = OTHER; note = uracil
  modified_base 20: mod_base = OTHER; note = uracil
gcgctttctttgacgttcctaa
